United States Patent Application Publication US 2026/0058010 A1 - sequence listing, part 9

SEQ ID NO: 91 - DNA, 20003 bp, Homo sapiens
  source 1..20003: mol_type = genomic DNA
tgctgagatgctgtatttccacccaattctgggtatatcagtgtgtcttgcagaatcttggatcattaaagataaacatatttttaatgcctgtgtggctctgtgttggggctgctgctgtttgtcctcagtgctttgtgatctgagactggcttggatgaaacagcttgagccagaggtgaaggggaagcagctctactcaaagcagaggagagaaaagagggtttgtttaatcggagcctgttcaagctcttgggcacctgcagggctcccagggctgctgcttgctgctcaagagggggctcaaagaagagttgggggaaattgtgcagctcctgttacaagcagggactgcagaatgaatgaacccacagccccggaagggcagagaggcaccttccccccttacataaatcacacagctcactccatggtggcactgtgacaatccaggatcagtctgtgtgactaaaataacagaggcgtcagaccaattagtgtcactagacttgggcgaaagagggagggagagatagatggtttcactgaccctagcctgcctcccctccaaggagggctggttctgcctgcacgggactgtgcttgggggtgggggatgcagatgctgcaggcacctccctctctgttcccggctggtttctccaccagttagtcatcgccctggtgctggttgccccccaaagtccgccttcactttgctggacttcctcactttggccccaagagtcctttgtgtatggccttagttccctgggcaaccccatcccttgtttttcctacttaactggtttcatctcggccatccacgcccttcctctgttctgccttgctgtagcctcccacctgctcccctccttattccaaagctaggagttttagagttggggggtggaagggtaagggagatgtctgagtttgctgctcctgccacaactccccctctgatcagccccacccctacttctcactacaaaccctacctgatttactggccactgtcaccgtaagtctgtctggtcattaccatgactcttcctgcccactcacagcctccccagccttgcctgcctgtcgaagatggattaactccgcactcccctgggatcgccacatgaccacttcaagtccccaagccgcccttcgctgcacagactgcatttttttctgccataattacaagcaatggcactgactggagggcatgacagtgtgtggtggggggatggacaggtggcacaatgtctgctgctcaaccccagcagtgcccgagccctggaagtaactcccactatttggcttggaaagtgcttcccactgtctccttcccactcgagctgggggccttctcctctattctgaattgtaatccagagctttcccttgaacatctcttcttccttgattcctgagtgccgcctctgctgctgctgcctcttcctgcccccaccgtccaccctccgctagtcagaccatgacatttactcagcagacgggaacagctttgtgttctttattgcctctcccttgggctaagggagggaccagcaccatgtccttctggagacccggaaccccccagcaggccagggaggcaaggcctgggccgccaggaagccatgcttgaacactaggttgggaggggaacaccccagcaccttggtcctattgaggcttgaagtgcctgcttgatcctgatcaaggggccaagtggaagcctgtgctggttgtggggaagtgccaggctcacatggtccagtaggcatagacgagcgtcaggaggataaagatggccacagagagcagcatgttcttccggttctcttgccgaagaaacttcagttccttctctgggaggaaagagggtgatagggataggacaggcagtttaggcccgtctgttctgctctgcctctccaacgagtgggtacacactgctgagggcaaagacgcacccttccagccacctccttacccataaaaatgactctgcccttcttaatctgcccaaatcctgacacccttttggctatagagccagcctgataaagtcccaacgcccagtgctgctcaactatggctctttaaatgtggttgaggttgagggtgaggtgggtgaggagtcaccaaaaatgccacacctgaaagccaagctaggaggtggtgtgaccgccaggtgagtctgcttgcctgtcatggggttggctgtggtgctcatccttcaaggcatctcatccgccaaccagaaactgagggcacctggggcctccttgggcctgacagtggaggaggtgctaggtggggccacgtgtttcctgagtccctgccctctgccgggtgcctggttgagcagaatctagggacgctaagatgcagtttgtgtccatgaggcagctggtcttgactctagaggaaatcagtcctgctgctctatggccacacttgtatcaaagtatcccctccaggtgacacgcaggtagggggtactctgtgagggctaaattgagtggtggtgtggttttgtgtgaaaaccgctaaacttgaagggaaactaatgtcccatccctgtctgtgctgggcagtgggaagagacacctgcagagctgctctgggcaggccagactgagtccagggcccagggtgcaccggcccagacatgctgaactccaggcagggctggtaggtgtgcactgtgcctacggcattcatcagaccagcgcttctgggggactccttgccattagaaccttcctggggctgattcatggccaggcctggtcccccaggggagaacagaaccgacaagtctgaggagcacctatagaccgtggtcctccccagcctttagcagggagcccaccagcctgccagccgccctctggcgccccgccgggcctggcctctacctgcctctgcccccagcgcccagaaggtggcggcatcgctccacccacaggagcccttgccgtacccaagtgggaggttcggcttccttcacccctcacttcccactgcatggttttcctgggagggtgtggtgggttggggtggggtgggctggggcgtggggagagcagacttccgatgtctaggtgaatgattgtctcctagacctggccacggccacatcccttcatcccaaagagcagacagacccacaggcggtctcatcctcccttagaacaaagcaacaaacctgctctcccgcaggctgctggacctagcaggggtgtctgcagcctctgggggctggttccctcccaaagaacccccttgctccctgctgccttgtcaggccccttgggcttctgacccttcctggttctggggactggaggctggggctggtaactgaaaggaactttcttaccgtagttggaggctttgttcattaggctgtttttctccttctccagggacctcctgtgaggggaaaggagcttcatggaccaaacccttttccttttccccacccgaggggcagctggcatgccagttggcagggcttgggtcttgttcggcggcagggggggtgtgcactgaagctaagatgtcagggacccaaaccctctgcctcaggcctactttgggggacccaggatagatacagggggtgggggcctgatggggaagggtggggtggctgggcaggagcattacctggcctctgggctcagctcccggctgtggagtctggagttcacggcctccaggtctctccgacactgggacagcttctcctctagcccatcgatctgaaacaaaggccacagagaggtgggctgccgaggcttctagctctcaaaacactgggactgggaagcagggcctccgggagtcttcttggacaggtgttccccccattcgttttggcagggcagggcacccaggcctgtcttccctggagtgtctttgttttgctgtcctctgcctccacgtggttcagctctgaactgcacaggacagtggcctgagccacactgtaaacagtagtgggtgttgcccagggtctcacagctgtcccagccctctgggccaagcacaggttgggggtggagaggagcagccccttggtctgttgtctccccagcacgatgccccagttgggcgcacaacaggagcaaccagaaccctgaacacggcatgcacctgccccacgggcgtatcctagagtggcggagatgctgtgaagaaactggcttccaaacactccacacgtgtggggccgggtgattagacatctaggggcaacacagaggtgtttttctcattgacatacttcatcttaataacttagtagtccaagttgtaaaaatatacatttttctgtgagaatcaaaaattactgagaaaaatgctcaaaaacacctttcttcctctctgacttggttcttaagcaaaaactttacctaccatcaaggtagcaaaatagttaaggtatctgttttttccatttgtttgattagagtttcagagaagtgttcttggggaaatacttgagttgtggagaaatgtttaataacatactggactgggttgtccaaacctgggttttggcattgaaagtccatctccctgtgtctgactcagtctccaggtgtttagctggccacctctctggctggggcgagcctgggtgtcagtgggtggaagggttcagggggctctgtgaccctcccagcagctgactgaatagtacctcggagccccataatgctccatttcccatctctgacttcactcattctcaccacttccctaggagacatggcaaataagacctccatttcacgaatggaagaatgggggtcccccaaatggaatgactttctgagaagtcagggtggggcacccctctccttatcagtctcagccagttctctgccccattcgcttctggagttagcccctgcagggttagtaatcaatgactgcaggtaagatccctgcctcccacaatggctggttagagggtagcaggcattctggggctgagtgtcaggagagttgcattccaagtctctgggccttctgtctctctccacggccaacacccatctcagccacttccatgtcagccacttttccttcttcccgagggaggcctggcaatgacacaccatccaccccctgccctgcagccccaccatggccacctccagccccataagcagggccctgtgggagagagcgaccacagagccttgagttaattgcctggttaattgtgtcgtttctctgctactgggcacccaaaaggagggctgtcctgggaaacagacccagccaggagatggggctgtccctggggaggccaaaggcctacctagaacctgtgcagcatggaaatgaacactgggaagccagattcagggaagagcggcagccccatgcccagtgcctcaggccaccatgtggcctcccctttacagcagcacccccagcacacagcccagcccctcagtaccctgagactcagattccactcaagagcacaaataaagcttaattcttgatgccctacctcctccaccaggcttccctgctgcccttggctgtggcaggggggtgggggttggggggcaggggacggggtgcattccaccctccttctcctgggaaattaaccagtccttccttcatgaggctgagtatattctttgttgcccttctgtttgtgtccaaactttatcttcccaaactctaggggtctctaaatggtgccaactggcagcccgtaggtcaggtctagcccacagattggcccattccacttatatatgtgaactgcctggtcccggcagaggcccgagtctaaagctcctgtcctagaaggaacagtgaccatctgtctcctctttgtgcccaccaaggcctagcctgctgcagtctttgtatttttagccacaatgagtggagttgagcttgggtgggactgaggggcaaggacagacggtttaggtctcacgtagcaactggagcctgaaacctccgttcttcttgtccatagaagctagaaaaagctaggaggaggagaagcaactagacatgcacataaattgtacgctttgcagattgcccagtgcaagtcttagtcctaggtgagatttctccttaacagtccttgagccaggccttggtttgcgtgtcattctggggagggagcagattgcggaattccatccctgaacacctctggaaggctaccaagtgcccaaacaagtggtaattgcccccagagcaaggccaggaactcatgctaagcaaaatcttaaaattttgaggttggcaaaccacaagtggccaagccaatctgctatcatgctctgggcagagcctgcggagctggcagtcgggggcctttatctgaacaagcccaatttatctgcagttccactgaatattcccactttcatttgccactttttaatgaggcttaaacggtcgaacacaaatcaaggttttagggactcaagttctaacctccctctatgaatatttatgtcctgctgacagctctcgctgattcccttctaaatagcaagttccccttctttataacccagctgcttgatgtgggctgagtgaggggaggctaagactgtcaagaggctcttcagaggccacaaacccatcctcagaaggtgaccctgcggggtccccagcactgggcctggttcgggaagctgacaatcaaacaccctgcagcatttgctgaagcaggagccagctgtcaacatgagtggagagactccaggggacctggctgcagaggcagggagggaaggtaggtccagatgcctcttttagttgtggctggggtcaggagtggtggctacagagcagagctgacacagcaggatgggcctgaaaggtgggagaggacccagaaagtgggtcttaaaggaagtcccgacttggattttcagccagctctcaactacatgcacacggattatgcactttgcagacgacccgaggcaaatgtgcagtcgttggttagctctctccttgccaccaccaggctaaaggcaacggaagacaagacagccaggaccaggagagaagatgtggggattaggaccagataaggagacaaatgtcaagaagattctagaagtgtaagggccagaactgggcaagcagttgggagctcaagtgcccagaagcctggaatggtggttccaggtaagtgagtggtaaggagcatgggctataatcagtgcccctggctctgtcactcacttgtggtatgactgggcaactcccttagttctgtgctcagttgactcacgtgtaaaacaaagataaccacatttcatatttcaaagagttttgtgaggatgacatggagccaacaggtaagatgcccagaacatgctttacatggtcagagttcagtaagtgtttgctatctttattatcagagagtggtttgcactagatctttggagaataaaagaaaacctggttagtccatggcaagagtaagagaaggtgatagaagcaggggtgtggctgggcatggtggctcacgcctgtaattccagcaccttgggagaccaaggtgggcggatcacgaggtcaggagatccagaccatcctggccaacatggtgaaactctgtctctactaaaaatacaaaaattagccaggcgtggtggcgcacgcctgtagtcccagctactcaggaggctgaggcagaagaattgcttgaacccagggggtggaggctgcagtgagccgagatggcaccactgcactccagcctgggtgacagagcgagactctatctcaaaaacaaacaaacaaacaaaaaaaaacagcaggggtgtgaggtggagaggaatctccatgagttgctgactggcagtgcagggaggagggcccctctaccttggatgtggccattcccagtccatgaagaggttcagcagggagggcccccagggtagatgtcagaacaacaacaggccacaggccagctcgctccgcttactccagacatggcatggtgggaaccttgcgatccttccctgggacaaagctggggtgggcctctggagccagggccaggttgcagacatggcacctggtagaatcctagcgtgagaggcctggagccatgtccaaggtggaacagcctgggggcggtctgggcatcagtgggcatctgaggaaatgtggaacagcaggtgaggcccagcagccagagccagggctcactcacaccatggttctaggcagcctgaagaggccccgtggaagggatcccaccaagcccagtaggaagggaaagttatactctgaaggccacaggggctcccaggactcctgcccgacaggctgcatagtagggccagctggcaggaagaggcatgcctggctcaggggccaggacttgcctggagctatcagggggcagcacttacggctgtgactgtgaccggcaaagtagagacagccaaggcagagacctagacggcacagtgtgggggcagagagcaggtgccccctgctgtacaataacattaagaaccacccgtgcattatatttacactcagaaaaccaaggtcaatttttacatggggaaaaagcactgtgtcccagtcactgagatgagtcagcagggggcacagggctgcgatctgcaggggctttggggaccccaggaagtaagagaggcgatggtatgaacccactgtcagccagcacactgcttcctggcatctggcccagcctgagccctggggaggcgctgtgtgaagccctgtgtgagcggtccaggggcccaaggaacaggttggagagtgtgaagggtgtcctggggaaagtctgttctttacccagagaccagcagtggctaaaaactgcctggggggatggctggggagtctgcctaggcaggggagacacagagcacaaaggaagaggggaggaggaaggaaaaagaggcatatgaggcagggaatggagaaggagcatccctcaggtagacaggtgggaaaggccccaggggaggccttagggagtgggacccaacaagtccgttcttttaacagaaaagccccgtagtgatgctgcctaaattactgagaactgctgcttctcagtatcagagcctggggcagggaattgaggcctgctgggtgaaggagtgagctcagcgaggagacccatgagaccaaaggccctccacagagggggtgttctgtgcagaagaatgagaagatctaaagtcagcccagcagtcaaggctgcagaggctgtgttgtaggcctgaggggtgctggggacaaggccctagccaagtagggccgtcaatcctgctggcaggtgccaagagcagaaagggcttcttcatgcccagcggcaggggcagggactcttcctgcagcctccctgagagcccatcagacagatgcagctccaagcacccgggcctggagttcagcagcccccaggcagataagcaaactcccctctgcagcctgacttggggaatatcaccttattctgggagctttaaggaagtctccctggggtcctatatgccataaaaccactgtgttaagagaaactgtaaaattcgtgtgaaatccccgcgaggcatcttttcaggagtgtaggccctctcagaatcagagccccacggaggcctcactgggggcagggaatttcgtgccagctcatgcacagataactgccccagcatcctggccaggtcagctgatggggtgccagctccacggctagctgctgttgggggcctcatatgcagcttttctgccaacaagcacgagacagttcgagccacaggctaccgttcactctattctcctactgaatggtgttcccacagagcatctagacagccggggaggtggctctctgcccactccctaatgaaccactgtctagggccagacctgtttctgggaaagggcagaaggcacccccggggcctggtgctgggctacacaggccactctgctttctgatttaggaagctgtttgctgtctctccggctttactcttgggagcttctggccagcgagtgacaggtttgctacagggtcaggcagtggtaatggggcatacactgcacctggctggacaggtccttactgggcactcagaccttccaataaagagcgtggtgccagggtagctgagccgagccaagtcacagagtctccagtgtctgcatgacagcatgagtgtaagcagcctctggaaaccaaaagtcccagcaaaatggaaccacaacagtgacagcagcagcaacacttctgtagtctgtgctgtgtgccaggcactgacctacatgctttacaccgattaactcacataatgctcgcaagaaccctgtgaggtgggcagtattatcagcatccacatttgacagatgaggggactcagacataggtaactgtccagggtcacacaggcattaagtccgggagctgggcagccacgtctgtgcccttaaccaccatgccacatggagaaggcagcgctcatcagctctgagggactcctagctcctgggcacaacctccacaccttacccctggagctgggcaggttgtgggcagcttcctgtgtctgcaaccgccctgcaaggaagggcccatctccatcttacagaggtgcaagctcccttgcagaggttttcagcaccttgcccaaggtcgtgtaactgggaaggggcagaattgaagcctgaatctgggtttttctgcttcagggcttatgctctttccaccacttcaagctctttctccaaaatccctcatgaaaacattcatgacaagagttctgcagaacagtcattccacatcccagctgaagcccatctaagcttgctgatctggcttcaacagattctctactcggaataatcttgtacaaggctctgctcagtttctgtctacataacagatactctctgtgagggaaagccctcattgaaatttgtttgttgagacagaggagacaggagcccagcgtctgcccttacactgggccaactcaatgagcttcacaaacatcccaggcattttgccccagatcacctcgactgtcaaagcatcctccaaaattcacacaaaacagatccagtttggagacggaaaaaggtgggctacttgggcctgataaacccttctttccccagcagtaccgaagccttccctttcacttgctaattcacagcctggagagtggtgtcagctgtttcatctccagccccagcagcctgggaactggatttttgaaaattcactcattttcacacgtcaggagaccccaggacatttattataatgggtaaagcagccaagtgcctgcccagatggtctctggcaagagtgcaggggctttccatttggagccttcaggctccacagcaagtcacacggggttcttaggcctcaattttccaggtgacaagcctcaaaccccaaggggcccattatccccacatcgtttaagggatgtttttctgtggaggcggctcacagagctctgtgggggcagaaaaacctccgcccatggctccccacatcaacaggccctgtaaggatttctctcgcaggttgtgcagctgaagacggcagaccttcccagtttttaatcaatgaacaattttcaggaagagcagggagagcctaggggcttgtcgctcgcctggacacacccccatgccaggtcagaaaggcgagggaaccgctgcagcccacgcgagtcccgacgccttcccgcgaggagacggaggccgagccagccttgcaagttagcgcccgagccagtccgcgcccgaagatgccagctgtccctgggccggaaggtggtgtggggtttgttttgtcttctttccccccgatatctattttttgataaactagcaaaagcttgttcatcgctgaaaggctcaaagcacttttcaagaactggcatccaccccgagccttatgaattcattaattaagatgctggcagacagccactccacacacgccgccatccagccgcgctaggtaatgaggttttagtctcctgacccccgtcaagtggcgcagagccagatgtaggctgccgcgagaaatcacctgcccaatggcgacctgtcgctctcgcctggcagcaggtgaggctcatttaatggtcagcggcccctgaacagtcctctgcgtgctgcgagcctttctcccagcccctggcttggggttcagggtcccagcaaggtggcgtctaaccgcctgctctactgtgacctccactcaactgggcccagacgtcagggtggaaggttcaatgcctcctcctgccaatcgagccagttcagcaaatatttattgacagtccactcacctgctcctagcccttgtctcaggaaagtgggaggttcccctgagccctgtgcacagcctgctccagagcggagaccgtcttcagccacacttggtgcttctgcctgccctgccccacggaggctactgcagtggctggcaccatacaaataaccacaagcgtcaagccttccggtgctcttcctggcctaggccattctctcccctcagcctaccacttctcatggtcagtgatcctgccttttttttttttttttttttttttttgagacgaagtttccctcttgttgcccaggctagagtgcgatggcaccatctcggctcaccgcaacctccacctcccaggttcaagcgattctcctgcctcagcctcccgagtagctgggattacaggcatgtacccccatgcctggctaattttgtatttttagtagatggggtttctccacgttggtcaggctggtctcgaactcgtgacctcaggtgatccgcccgcctgggcctcccaaagtgttgggattacaggcgtgagccaccgcacccagccgatcctgccctctttttctggtaaggattccagtgaattttcaatgactcccattagcatttattccttacagcagatactgtcaactggccaacacaacaccgactccccacccctgctcctttgcccacctctactccagaaggtggaaaagctcagcagatgctctcccaacctcactgcagctaggcttgctcatgacccagttctggccaatgagacgttccagaagtcagctaggagactcctggggaagcttatgctttgttgataaaagggacagtgttgttccttcctcctccttcctgagttaaagttgaatattagactggagctgtggcagctatattgtgaccatgaggaaacagtgaagagaatgcagaaataccaactctgacatagctaagcttttgaaccaatgccagtagccacctacctacaaattttttttttttttttgagacggggtctctgttgcccagactggagtgcagtggcacgatcttggctcactgcaacctccacctcctgggttcaagcaattctcctgcctcagcctcccgagtagctgggattacaggcgtgtaccaccactcctggctaatttttgtatttttagtagagatggtgtttcaccatgttggtcaggctggtctcgaactcctgacctcaaatgatgcacctgcctcagcctcccaaaatactgggattacaggcgtgagccactgcacctggcccctacaaatttctataaggggaaaagtctactcccatttgcttaaatcattgaggtcagttttctataacttgtagccaaaagctttccaaactgataaactttctgtactaggggtcagatccaaccaagttatccactttaggataccggctaagacaccacacatctgttaactcaagaccaactggtcactgaaacatctaaagacaccagtttgaacagtccagctacaaaagaaaagtgcaatgacaaaggaacagctcattaccatcagagatccgaaaacacaaacaggttttacatcagtcaaaattctcctatcagtttagactgaaattcaacctttccttcctcccacacaacattaaaatcagtactgggtgggtgatttctcatttgaactataattttcttttcttattaagaatgaaatctcagaagctaaaactcacagttttttccaactctgagatctcatatggtggcaaatgaattggataaaaagacctcaaaaggaaccactttgagggggaggctagagggtgccctggttgtcctaagaggtggctgcttatacagctggcccaagccagccctaagggtgagtgctgcctgcttggtaattgcttcattacaagtggagactgtttgcaggtgctgagatcactcacttgtgggggttttattgcactcgtcagattaacaaacatttttgattaaatcaccacttcattggctctgagcacacaacttttaataagaggacaatatctactgctactgagcatcagtgcacattcaatactcagacccgctgggggcaactgagaagcaaggtggggagacagccagccagatgtcaggctttttccaaggcacacggttacagatgtcaaatcttcgaatatccaagcaaaaagtaaacttagggaccaagatagcaaatataaacatctaccgtggtatggagagggtaaaacaatggaatctgccccagtataaggcacttggagaatacatgccccaccaagtttaaaaacgtaaaaatccggccgagtgtggtggctcacgcctgtaatcccagcactttgggaggccgaggcgggcggatcacttgaggtcaggagttcaagaccagctggccaacatggtgaaaccccgtctctactaaaaatacaaaacttagctgggcatggtggtgcacgcctgtagtctcagcttctcgggaggctaaggcacgagaattgcttgaacccgggaggctggaggctgcagtgagctgagatcatgccgctgcactacagcctgggcaacagagcaagaccctgtctaaaaataaaataaaataaaataaaaacttaaaagtctgtcagccaaacagaagacatctgtgatctgtatttgggccatagtcaaggagtttgtaacccctggtgaaattcaagtccttcatgttatagatgagtgaacgaatgcccaagaacgagtttgacttagccatggtggaaggatgcaaaagaaatacaaaggctggagctaccatgtattgattaccaatccggtgccaggcacgtgctgggcacttaacgcaatgtctcatttaatcctcacaaccacactgtgaggtgaggtgccatctgtagtgagactacaggctgtctgtgaaaacacactggtctcttcctccatagtaagcaaacagtagctggctatgtggcctcctgactggtgaacgcatttccctgatcccttgcagtcaggtggggttttagttcttgccaatggaaagtggacagtttgggcccaggacagtgggtgtgcttcctccattctcctctttctctgccggtggacacatcagtggggtatgccccggttccactgataaggtgacaagatctcaagagatggtgaagccacagaggaagggaatctggcagaaccaccatagacctggtactctagaccaggagttggcaactaagccctgtggccaaatggtctaaggactgttcttgcagataaagctttagtggaacactgacacacccacttatttacatattccttcatttacatactcctaccttagcctgaatacagttggttcttgttgttcctggtagctatgtcctataaagttgcctctaatattgaattagcaaataccaaaccaggtgaggttcctgcaagcctatggacacaacatttttgcaaccttgtttcatgtgtgattctgtttaaagtgaccttattcaatatatattgttgattcattaacactggactcacaaccaacagcactatacgtgctgttacatcatgagttatatcatgcctgaacagtttatctaaaaaacctgttttcttctacaacacatcacagccttcttggatttaggaatgccagacagcacttcagccctatgcttggggtcgggggtcggggatcgggggcactttaaacagcaaaatcaggcagtggctcacacctctaatcccagcactttgggaggccgaggtgggcagatcacctaaggtcaggagttcgagaccagcctggccgacatggcaagacccccgtctttaccaaaaatacaaaaattagccggatgtggtggtggtctaatcctggctactagagaggctgtgtcgggggaaggtgggggtgaacacttgaatgggaggtggaggttgcagagccaagagtgcaccactacactccagcctgggcgagagtgagattctgtctcaaaagcaaaacacagcgaaataccaataaaaaacatgagaatgaaaaaaacaaaacaaaacaaaaacagggcactaaatagaacacaataaggacccttgtttacagtaggacagctgaaacaaggcagggcatcatcacctgttcaactttagctgagaacatggactgcgagcgactcaatttttttcccactgctttgcatttgccacaaaagcactgtgagtactgattttggggttacaaatacattttagccattagggaaattcgcaaatgtggaatctgtgaataatgaggatcaactgtagttgcaacccagaccatttggctctctagaagagaccatgtctcttctaaaatagttactatctgaccatttgcagacatctcctgccccttgctctagcctgttagaaaaaaactcactttcttgttcttgaagccactgagttttggagtttctctgttactgcagcttattgtaccctaatgcaggttacaaagtctatgttcttcccgccacaaagtaccatctcagtcaccactcataaaccatcctcttcacatttccatcaacctttttcctaccaagtgggccaatatttctcaagggatgccactaaaactacccacatcaccatggggtgtgtgtggcttgtaaaaaaaaaaaaaatgcagattctggccggctgtggtggctcatgcctgtaatcccagcactttgggaggctaaggcgggcgggcagatcacttgaggtcaagagttcaagaccagcctggccaacacggtgaaaccccgtctctacaaaaatacaaaaattagccaggcatggtggcacgtgcctgtaatcccagctactcgggaggctgaggcacgagaatcgcttgaacccagaaggcagagtttacagtgagccgagatcacgccactgcacttcagcctggacaacagagcgagactctgtcttaaaaaaaaaaaagcagattccttgttaagaatgcacatcaaagtcctactgaattactcggggtgtgggaagagttcaactctccatttttaacaagccctgtgactctatgcatgctaaagtttgagaatcactgaactcactagtaagcctgaagaagactatgaccctgtacctctcctgcaacctccgggaggatgccctaagggaaggaaaacaggggaagcaagatgaatttccaggaagaccacctgtgcttgattcccaggctccaccacttccaccatctcagcctgggttccacctggaacctcaatttcctcatctgtacaaacctcacaggcttgcagtgaggattaacaatgcaatgaaagtagcacatagcggttgctcagtatgtatgttttctttcccttctatatgcagcaaattatttttaagccattcagtgacatcaccaattccagaattctctttacatattcccaaagtaattttgaaggtacaagcttccatactccggaggaaaaatttccccttttagaggatatttaaaccattaataatatacaccagaatgggctccctcatctttgagtcctagccctttgggagttctccttagattctacaggtccctatttctctggggtctccctcacctctgtacccatcccttttgttctgtgtcccccgctttgagttccctcacttctatgccaggccgtctttggggctccccttcacttccatgtctcttcctctctggagatgccctctccagagagtctggttcgcccatccggcacctcctcgggctccctgtcctccgggaaccccgtgggccttctcacccctcccgtccctctccccaaaccgcgtcgccctctcatcctacgcttggctcctcctcctatctatagcccagcctatcccttatcccgcggccaggagaaggcaactaacgaggtggcccaacccccacttttcccctcacctctagagcgacgcccagattctcccgcttctttttagtcatgttacttgccgggatcccccagtcatcactggacgcgcccaccaagtcgctatgtgcgcatgctcaagtcttcgtgcttctccctcattggccaccgagtcagcgggaggtggggctgctgccgtcgccatcttgttgaggggcgcggccggcttggtgcggacatgtttatgaggggcaacctctagcttgagacctcagcctagatgggtggagggtggaaaagtcggtacagggaggcagaatgtacagcccgggagtagacctgcccctttcttccccagttttaagccgctttgcatcactgagagccttttttaaccccatgttctctttcagtgtgttttgtgtttcagcaacaaccccgtccctgtttaggccacgccccccattcaaagtctgtccatccttcaaggccggtgctggagccttgagcttctcggccaatggaatctgataatggccctctattgttatttctcctttgtgtcttgacttctttttttttttttttttggtttgttttattgtaagaacaacctacaaacatcacagaaaacatataactgagaagcagcatcctttattctaccaactttatcagttcctctttgcttctgtttattcctcccaggcttggcctcacacacagtattttacattgttgtaatcgtactatactgtacaccatagacccacggcctttgaaatgttttgactgtgaccctacgataaaaaaatgtattttataccatggcccagttacccatgaaaccaaaaccaaagtttcacagtaagtacctttacctcctgtaatgcactctgttattttgtattcttgcctatttaattaaaaaaaaacaaagtcgggcacggtggctcaggcctgtaatcctgtgtctggagttggttccttcaggtgggttcttggtctcactgacttcacggtgagtgttacagctcttaaaggtagcacggacccagagagtgagcagcagcaggatttattgtgaagagcaaaagaacaaagctcccacatcatggaaggggacctgagtgggttgccactgttgactgggggatggccagcttttattcccttatttgtcccctgttacagagcactgactggtccattttacagagtgctgattggtgcatttacagtcctttagctagacacagagtgctgattggtgcatttttacagagtgcagattggtgcatttacaatcctttagctagacacagagcgctgattggtgcgtttttacagagcactgactggtgcatttacaatccctaggtagacacagagtgcttattggtgcattataatcctttagctagacacagagcgctgattggtgggtttttacagagtgctgattggcgcatttacaatcctttagctagacacagaacgctgattggtgcgtttacaattgtctagctagacagaaaagttctccaagtccccactcaacccaggaagtccagctggctttacctctcaatcccagcactttgggaggctgggcagatcacgaggtcagtaatt

SEQ ID NO: 92 - DNA, 8069 bp, Homo sapiens
  source 1..8069: mol_type = genomic DNA
tacctcctcacttcatttcacagtctctgttttgtagaacaaggggatgctccaagaggacaaatgtgaaggtctgtggtcacttcaaggctgcaatcccctgggtggtaagaacacatccaccatggtgctctaaagaaaattctgggcacttgttagaatatcatttagggacaattccacccaaaagaatatacatcaggagccatttttccacccactatccttgttccacctccaacattctcttgctgcatttcagaataggaaacaacctcttctctctggcattgcttcaagaaaaggatataaacaaggggcccgacaacgattctggaaattgcttctcctcagaaagcaatatggatatttatcctagaatatggaggtcggcctatactctagcagatggtctgcaacattctttattgtcactaggtttggcttctgtttttgctttttttttttttcagggtttcactatgttgcccgggctggtcttgatctcctggatgcaagtgatcctcctaccttgggctcccaaagtgttgggattacagacatgtaccaccatacccagccctgtttttgccttaattctacttggctatgtggatttttgttttttgaagaatctaaaagtttctgcgtttacacagtgcatctctctaagtgcaaacttctaatttggtgagattcaggcctgggcctttgcaacacatgataccataatttgtgcttttcaagactactcctttctgcaccaggtcatgacagtacatcacactctgtaaccacggtacagttacctgaccctacctgtttatagcaattgcacctttggttccagagttgtagaagtggggaacccatctggattctgattcattctcacagtgcttgtgtgacagacagggcagaaatcatgatcccccattctacaggttggggaaaccaaggcacagagaagcaatcaacccaaagtcactcagtaagccagaaaacaaactaggtaaaggtccaggcaagaccacctatgttcctttcagtgccttatctgaaaaatcagattgtctcctccaatgaatgcacatactttggaagtaagtagttttaaagcggaattttctatggtttcaaaagccctttaccaactcaagaaccacaaggtaagaaccagaatcacattaaccttttagttaaatgcttctgactcatggataataccaattatttcaactcactgacaacctggttatcaacaagaagaaaatttaaggaaaaaattcacccattcaataaaaaaacctcggtaaacagctcctttccttgtttcatgatatcttgagcctaacacccaagcactgcttccttctacagaatacaccttttatatttgttggcatgtgatggagtgggggtgaagggttgacaaagtgtgtgtgtatggatgtgtgtgtaataatcagccatttcagggacaattttacccagcagaatatatatgaaatatgtttaatgtagcagttctctaccctgtttccattttttttttttggtaacattttattcctgatcctggtttaatgtaaaaagtgatgttttacttcccaccttccttgatgaaggcagagtcaatgggtggatatggccgtggggcaatttcagcttaatggaagggaagcactctaagggttaaagttgcctgatgacaactgaatgtgaccttttggaccacagagtgacctggtattgcaagtatttcaccccagaggctaaatgaccatctgtccacgaggcactgccctttccaacactagggagccatattcccagaaagaaactaggctgacagcaatcctcctgcctccccctccaggtcaagaaaggcacaaaaaggaccaacaaataatactgacatggtgctttggatccaggaggccttgcggtaccaggagaggaatactgatggttccatctggcgaatgggaaaggtgaggcattgagagggtgaaatgctttcaggcataggtgagggggtaccaggaaatttaagggggagactctttttcctgggggcaggtggagaaggtacacgaccactgatagtgaacacaactctcaacaaaggcaattccagctcttcggccaccacagtaaagcagccaaggataccctaattgtcctcagagaagtagagatgattccttcacagagggaatcctacactccaaactctctggggcccacccttgagacggcatgcagggctggagatttaggcaggaacagcctgggcaggcacgtaaggtagctctgcttcttaaggcatgactgctgtcttcatggagtgggccccaccctgcaaggaagcttaatggaatggaacactgctcccaaaggaatccagcccctccaggggctgggggtttctattaaagctaaacagcatcaccaaaccaaccaatttcctgtgccacttggtagaatgagggagggggcaaaggacaaaaattgaacattatctgcagatgactgtctaactagaaaacccaagggactaaactggaaaactatcaaaactggtgagaatttgctcaggtggccgattaaaaggtctaaaaaatcaactgctttttggatcatttgggcgtggcttgacaccttggaggagctgtgtttctctgggaggcctccgcgatttgtgcagcttgccatattttgaaagatggaggtgagccagggtgatgttccctcagcagtagcaacactgtctcagacaccaatgtcgaacaggtgcctggggcaactgctgcagaaggggtggggacaaccacctctgccctctcctggggggccctctcaccagtcctgatcagcccctttcccccaagcttctctattccagcccaagagacacatagggaagtttggcaagggtcggtgcgggagccatcaagggtggatgtgggcagattgtgctgtcatctccaaatgaagtaagttttaaaaacaaagggggccagctgacaggtcccaaacgtctgtactgttgttgcctcattggtcagaagcctcgagaggccaccgcgctgcgcaccgagcggggactcccacgatggtcagtggttgagggaggccccagggggctgtgcgtgccaatctggctggcaaagagccgcagttatttgcggtccaggctggcgtgtagctgggcctcccgcaccatgcggtcgaaggatcgcgtgttggtctcctcgcgcaccttctcacgcacgtggaaggaagcccgggctgtggagcgggcgctctccagcgcactgcgccgttcccgcgtcagctgctcgctgcgctccagcttgcgcccgatggcctggagtagctctcgccggcggcagtcttcgtccctctccaccttctccttgttggcgcgctgggctcgttccttctccagccggctctggcccacgcgccgcgccttctgctgcactgcttcctcggccacctgcgtcgcgtgctgcagccgtcgctcccccgcccgggccagcgcctccaggtgcgcctgatgttcccgctctttgcgctctgccgcctccttggcccgccgaccctgcagctcctctcgccgggcccgctcccgcagctcccgggtgcgctgctccaccaaatgctcgtagttctcctgcgcacggcccaaactggcttccagcgagctccgcaggccctctcgctcctggcgctgctgccgggtccgaccctgtagcagcgcctcgtggcgcgcccgctcggcccggctcagctcccgcttctcccgctgcagctggccctcctgccgctgcttggcgcgggccgcgcgctgggcgcgctccctgcggatctgctcagcccgctcccgcccttcctgtagaccttcctcacgttgcttcaggttctgctcctgctgaagcttgcgcagccgatcctcccgggccgcgcgctccgcccgctcccgccgcaggaggccctggcgttcggccagctcccgccgccgctcctcgctgcgctcgtactgccgctgccgccgccgcgccgcctcgcgctcttcgcggccacggcggcctcgccgctcctccacctgcgcggcccaggctcggcggccctgctctagggcgcgctgcttctcccgctcctcgcgctcccgccgctgcttggcgtgcacgcgctgcagctcccactggccgtgggcagccgcgcgttgctccagcagcaggagctcctcctggtgccgcgccagcatgagcgccgcgatcttccggtcacgctccggcaccccgcgcaggccgcgctctgcacgcacttgacgcacgatgcgctccacgtgctgagcggtctgcggcgaatggctcaggtcgccgaggctgaagctgcggccggtgatcggaaccagggtcagggcagacgggcggcccggagcgttggtggtggaggacgccgaccccgctgggcagctgttcctggccgaggcccgaggcggccagcgcagctccctcaagctttccccactgtaggatgacgacgatgcgcccgactcggagctgagggcgccctcacgccggcgggacagtgagtccagcgaatggctcttcctgcctgttcgagaacccgctggcggaggttgggtccgggcggaggagggactaggggaagccttgcgggccgcacgcggcgcgggcgaggccgggaggctggcgctgctgcagctgctgctgctgcccgcgctcggggccgaggccgcggcggcggcggcggcggcggcggccgcggggctcaaaggcgtgaaaagacgccgcttctcctcgcgcatgatgcgctcgcgctcggcccggcattgctgcagcttggcgcgccgctccgcctcgtaggcctcatacaggccggtggccacccgcatggagcggcccggagcctctcgcaccaggtcggccagggcccgtggcagcagctccaccggcttgaccgcacagcgggcgcaggcctctagcgagcgggggctggtcagcacgtagcggctgccctccgcctctgggcagtcgaagttgaagaggtcgaggtgcagcagcggggactgctcccgccgcccgccttctgcggctgcacatgggacttctgccttgcggggcaccgccgcggaggccgaggccgaggccgaggaagctgcgggctcctgtgcgccctgggaatcagggggcacggacgccacggcctcgtcccctccagagtcgccgggttccgctcctgccttctcttcttcaggcactgggtccaccatggctgagccccgtcctttgttggaatctctgcagatcacaaggagggacatcgaggaatacgtctgagagctcttcccccctcctcatccatagtcaccccatcccaacttaatccgctttcggattaggctcagaggctttggtggaacgtaaatcataaaaccgatgtcggaaagcccaggctgagcgccagaacggggatgggggtggggcggacactcgtgttcagagagcagcctgggtctccctcagccccggaatgcggggtggaggcctgtggcgaggctcctctgggcgcctagcccgctagatgcatcccctttctgctgcaagttaagatgaaaagatccaggtgcaggcaggagctagagagggaggcgctggaggattcccgggaggattagcgtatttgtttgtagcttaggcgggctactggggatgcagctttgcaggaacaaaaaagcaagaggcctgttcatcccaagggaccccatttgcctaagggaagaagtttatggttgatttcccctgccaaaggagactcggtcgcaaggcccccgggtgattaaagggctgggagaagtccccaaaggcctctccgggaggggtgatggattcttgctccagcagctctggcagggcttactgagggctctgcacgccgcctccgcccccacctccacccccaccgggtgtttgctggggatggagaaggtgcctggatactctcagacgcaccggatctcctccaagtctgaatgtgctaaagataccatccaccccagtcggggttcagatacccgccctcgggtgccctccgagttcccccacagcatcccagtgggtgggctcctggagtgcaaagaacctggccgcccaggttcccgcagctcccggtacccgagccggtttactcaccccgcgtcctgggcttcggccccgcgccaagggcttttgttcgcagctcgccgctgtcccctgcgcttcttcagtctctgcgccggcggggtcgggttactgccggctgcaaccgtgaaaggagccccatctgccgccgccagcgtctctccatggggtctgcgaacagggcgcacgcaccccagatgctacctacacgtgggagggggagtgcgacaatgtctccctaaaataacgcggctctgcacccttccctcacattgattctttaaaaaagaagcccggttccgtcgctgcggcatccctctacacctctacaaccgtggaggtaccgcaggtcccacgctgccccctgcgcctcctggcggacactcgagggtgctggtttgtttgcttcgaggacgaaggagaaatttttgtttaaatgtatatatgtacatatatacacacatataatatgtatatatatacactacacacatacaggtagatgtaggtatagatatggatagatatcgatatataaatcaccaagaaaccctagtctttcagcagcctaactgggtagaatgaaggaattgctcagcttgtttctaaaggaaaccctgaggagcaaacaaacttgatagcgaataattgggtggaaatatggcgcctgatgcaaattgtgattttttttttttcaatgaaaaactaaaaacaggctgggcaaggtggcttacacctgtaatcccagcacttcgggaggtcgaggccagtggattacttgagtccaggaatttgagaccagcctggacaacatagcgagtccccatctctaaaaaaattttcaagaattagctggggtggtgtcctgtgcctgtagtcccagctactccagaggctgaagtgggaggatcacctgagcccaggaggttgaggctgcggtgaaccatgactgcaccaccgcactgcagcctgggtgacagagtgagaccctgtctcaaacaaaataaaacaaaataaaaacaaacaaaaactaagaacacttatgggtttgacgcaggtggaacatatgtaactggtgtttaatgcaacattttatgacttcctggttatagataataacaattataaccagttagtgccatacaatgagtgttattttgagacatctcctgcccacctcttttccattttgagtgatagtggccgtaggagacagaccggaggagtgcttgatggagggaagtcgaggagaggatgggacataacattagagggaatattgaactatgcattaaataaccttggctgggtgtggtggcacacacctgtaatccgagcactttgggagggcgaggcggatggatcacttgagatcaggaattcgagaccagcctggccaacatggtgaaactccgtctctactgaaaatacaaaaattagccgggtgtggtggcatgcagctgtaatcccagctactcaggaggctgaggcaggagaatcgcttgaacctgggaggcagaggttgcagtgagccgagatctcaccactgcaccccagcctgatgacagagcgagactccatctcaagaaaaaaaaattaaattttaaaaaataaccttgacattgtcaggtagactgtgaggagaaagtgaagggttttaagtggggaaatgacatgatttggtttttattttaggaacataactctggcaacagtgaagtggaggctttacaaaggccagggccaagaggaggcaggaagcccagttagctggacactgtggtcaccccaggcaggaaggattggggccagagaggaacagtggcaggaggaatacagcacatagtgatgggg

SEQ ID NO: 93 - DNA, 96124 bp, Homo sapiens
  source 1..96124: mol_type = genomic DNA
ggagttcagtgtggccctgacccctggggtcagtttctgaaggcagaaaaacagaggagcccccacacgttttgcactaggaagagggggctggggccagggcacaagggggcttcgggtgctgccgagactgcctgtaggtggtgtggtcagggctgagggagggaaaaccccaggtcgtcgcagacagggtggagggccttcttgacagatggtggggagacatctggtggcatcaggacatggggcatgggcccatgcgttgggccacagaggaggcgggcagctgctccctgctcctctgtaaagatggccctgaagggccaggaggcactgaaaaagcaaccattgctggcggaggccgggcactgatgcgtctctctcctgcagaccggaagcctcccctcgctgctgccttaggtgaggctgagccgccgggccctgtggatgccactgacctccccaaagtccagattccccctccggcccacccggcccctgtgcaccagccaccgccgctgccacaccggcccccgcccccacccccctccagctacatgaccgggatgtccaccaccagctcctacatgtctggagagggctaccagagcctgcagtccatgatgaagaccgagggaccctcctacggtgccctgccccccgcctacggcccacctgcacacctgccctaccacccccatgtctacccgcccaacccgcccccgccacctgtgcctcctcccccagcctccttccccccacctgccatcccaccccctactcctggctaccccccacccccacccacctacaaccccaacttcccacccccacccccacgcctcccgcctacccacgcagtcccccctcatcctcctccagggttgggcctgccgccagccagctacccacctcctgccgtcccccctggaggacagcctcctgtgcccccgcccattcccccacccggcatgcctccagttggggggctggggcgggcagcctggatgagataacgtgagccttttttccctctttgtttttttaacaagattttctaatcgacttgcagagtagttgaagtgggtaagcagcagggtaccttgtataatgcacgacagttgcagtatgggaagaatggaccgggcccctgggataaaatcagagtggtcctcacacctagaggacggggacaaccagctttcagagtagcctcatcagtgcccttgcagtctgactgtgtacacttggttcagctaatgtctgagagtcctgcactgggttactttatactagtgaggacgttaaccagccatattggctcaataaatagcttcggtaaggagttaatttccttctagaaatcagtgcctatttttcctggaaactcaattttaaatagtccaattccatctgaagccaagctgttgtcattttcattcggtgacattctctcccatgacacccagaaggggcagaagaaccacatttttcatttatagatgtttgcatcctttgtattaaaattattttgaaggggttgcctcattggatggctttttttttttcctccagggagaaggggagaaatgtacttggaaattaatgtatgtttacatctctttgcaaattcctgtacatagagatatattttttaagtgtgaatgtaacaacatactgtgaattccatcttggttacaaatgagactccttcagtcagttatccaaataaaagcagttctgaaactatccctttctttgttatgggtggaaggtggggctccaggccttcgcagtctgtggcttataaaatgtgcagaggccctccttccagaccctggggacgcgggagaggcctggctgcagctcacagcagccacagccaaccccactgcctcccaaggcactctgggtggatccgcacagctgcctgccaagccagcctgcccccatcctgtgcctgccttggtttcctttggaggacctggttgagttccaaaccagtttgaaactttgaagccttgctgcgtagaacgcacacaggaacccgggggcttggatttgaaaccctttccacttctggcctgtgatgagacagaggcagctggaggagcagcggcctcactgtccaccttgaggggccacggctctgtctgtggaaggggccccgactgagcccccatctgcggtgcttgaggggccttggccctgtctctgcctgctgaccctgccacccacgacagaaacaagcactgagcacccagccaggaggctcacaaagaggcctttatttatctagctcaaagtagacactatcacaatcttgtttgttactccttttactaaaatagttcaaatcaatgtttttaccacactatcaaaaagttctatttcttcttgtctccccacgtcagagtggttgaatagaaggtagaaacaggccgggagtccacgggctcccagctctaaacggcgccagggcaggaaggggtggctccaggtctcactgtggcaccttctacagaaaatagacgtagctgccgggcccggggacagaaaccagacgttccagtccatctccaaaaagcagcacaaatactttgccccacagtatgaaaaatatacacctctaccgctctgcagtcatgcatttagttttaagaaaaaaaaaaaatcagtagtatgtatcttgtttcctcaagtttcaagaaaaaaaaaatgaaaggtcacttttttctctttaaacactgatgtgtagctagtaacttggataaaaaggtgccaccctacaaaatgtgctcagcatgttctgaggccaggatgggcttggccacctgggctggggcgaaaggagacctccatctgtcacagtggaaactgaagccgagtgccagtgccgcgtccggcttcaagatcaagagtcagagcctttgaaatggaaagggggcatctgaaagggcacccccactgggggctttcagagctaaggctccagaaggaagggggtcgccctgctagtgacggagctgggagtcaccctgagctacagcatgcccagatttcccctgtgggaagccccatctgaccttctacagcccacggctctgcaactgccacctgtactcaggtacatggcgtcgctgctgctggcttttaaaatcagctattagtttgagatgtgacagtcgccgacagggttctgtcctagaaagccatcccagtgccgtgttggctcaggggtcaccagctttgtgctgcctccgtaacagcaggagggttctcaaagcaatgttccactgatccctggatgccactgcagcattaaagacagggtcagtccccttgaggggaaaggtggcttcaaggctgttctctgggcctgtttgcaggagatccgcaggtaccaggagcccgtacttattgcttatttcagtggtggccacgccaacctgacccaaacatgatgcacacgggctcccagacttggctgccactcaaaatggacccacagcccttgggctactctgcggttctttggactgcaagacccagaggggcctctgctcagctgcccactcgggcaagaatcactgggtaccatgagcagcaggtgttcacccaacttcacgtgtacacccctagtgaccgggagcgcaccacctgaccgggcgacactccttcccaaagagcctcctggcaacacccacggcaggagcgccacaccatcccatcaccagcacccacttacccccctggggctaagatggggggcgtgagcctttcccctgagagcaaacgggcagcaagaactgctcagaatagagccgccagctagggagagggacagggcggccatctccctcctcttgcctgcatccccagccctgggcctgcatgagacctgctgggtaggaagacagcctctctgggctcttcaggtggggctgagcagcccctggaagagcacaggagtctgacgaggacctggtgaggtcctggacccaagagctagggctgcttacagtggcatgagcggatgtggggaagcggcctgtccccgtgctgcagctgtgggatcaaaatccctgtcatgtgccacacatcaccccctctaggccttactttcctcacacacacagttttctattgcactttacagtttatacatggtcatttacactgaagatctcacttgatgccagaatcctgtgaggagggccttatgctgcccattttactactgaggacacgggctcagagtggggaggcaactctccacccgcagcgactgcaaggcagcagaactcagctccacccggcccgccctcagccgtcggctgttggctcacgccccctcagtgaggacccctgccctgtggcgctggatgacctggagccataagcatggccgaaaaggaacctcagagacctgtttccaccaagagcccagacaggctgagtgaactgctaaaggtcacaccacaaactaaaggcagaacctggccagacacgctccttcccaaaaagaacagaactctcatctgcagcctacacagctctgtccacagggacccaagatgcagccaggccctgggggaggtcacagccaaccagagccccagctgtggcccagtgctgcccatcaggaaaatcacatgtggctcagcccagaaactctccccaggcccttcctgttactggcctgtcatgtaaaccacgaaaagggacgtgcctcaggcatggggcaggaggagcccaagaagggcatagcctggacagggtggcagggggacattgcagagactgggggggagggggatgacctccaaaagcaaggagcagcgggcatcgggtggctgagcacagatccccaggtgtgagggcaccctgacctccaaggctgagggtcacaggaagggcccagggcagcctccagccagccacagatgtggtgagtggccttgtccacatgccggggacccagtgcttggggggcctggggccaggccacggcatttgggcaagaagtggtgccacctgcgtcaagacccaggtagtggtggtctctgtccagtgtgggtggcagccggggagtagagggtttgatgagtggcccctccatcccaggcaggacagaggagcctggacagttcccaggctggatctcagaagcagcctgcagcctcttgctcatggagcccagggcccagagggggaatgaggcgtccgggccgctctgctgcaggaacagtcgcagcgtctcgtcttcccaggttgctggtgtatgaggcgggagatggcggcttgggccagtgcatcggacccatggcagctgggccagggcgggcagcgtcctatgtacagttcaccacagaggaagaagacaggggctgggctggaggtcctgcccgtgtctggggcctgaaactccccctggggacccccagcagggccagtccacgtccacagaagagtggccctacaaaggccccttgaactggttcccagacaggtgctgccgtatggagggcttggagctggctgcatctcccagctttctccagaccacctgtggagaggagagagatgtgagtggtgggactcacccgcgtccacctgccgcctatgcacatccgccgcctcatcacggcagaatcacccacgtcctcagagccatggggccaggagggacacggaggccactgcaggcccagagacacccacaccaggtctttgcatgccgcgctaactatcgggcctgagcaggtcactgctggggtgtggctcagccttgcagctgtccagtggggtccacaggccccactaggtgatgcgggggaggggctgcacagttcagagcctctcgccccccctttaagtcctgggttcagaccctatgaaactccttccccgatggctcctgcaagcacccccaaggagaccgccgatggtgctcagctgggtcgagcacggagctctcctgggcagccccagcctggtgggctggagggttccacctggacctcctgctctgagcaccatctgcccagccagcagccacagggggcaccagcaagctgagaggcccgggggccagcacccagggaacacctggggtgaacaaaccagtcccgggggggtggggggctcaagctctatccagaaccccaggcacggcactcctggggagggcggatctgcagacaccaggggccctctgggaagggcagggggcagcgagatgacaacgggccagggctcctagcacctctgaggcctccccccagctatccaaggtcacccagccttcgctgagcattcgagaaatggagtcccacatggggaagggtatggccatgctgggtggccctggtcgcactcccagtgccaagcctctgccccccacccctggaagcctcacgttgcacatctcgcgaacgatggccttctccttctcactcaggtcctcctcacagctgtcctggagctgccggtccagattctcgtgtacctccaggacctgaagggaacgggtctcggggtcaggggcagaggccaccggcagacctcgggcaagtcacctggcccctgatcctcagcctcccctgctgcgaaccaaagctgaggaccctgagccgctgggcccctggggacaagcgtggaaaaaactgaggggcaggttgtcatctcaccctgctgacactggatgccctacaagggaagcagctcatggctgggccacccgggaggaagtagacaggctgggcaaggaagaccctcagacaggtggactcactgcaacccagggcccgctggagatgagtgggcactcgccacgtggagggggtgtgagtaggcgtggccgtgcatgcatgtgggatgtcatggggcacgtacgtaggaggaaggggggcatgggagtggggactgtgctcaggtgtgcacagcctggaggaaccggagcccatcggactcaccagtctgcacctgcagaggctgggcctggcagacctgaggttagttctagccccactcctgcccctctctctctggccttagttgggtgcctgccctccccgaccccaggcctcagtcttgttaggtgcagtagctcagggatggcagacaggtgacacacttatgactgccacctctgagttcaacctcacagtgctccaggcagccatggtcacccagccacccacacacagatgaaacctcccacccctgccacttggatacccctaggtgcaaaggtcccacagtctcacagtgcacccagcatctgaggacttctgagggagcgggtagtggccctcaccttcatggcatgcacgacagcctcgggcttctgtcctgcagggctgtagccagcagaggggggcgagggcagctcaggtgcggggcaggccgggccctggggaaggcaatcacacatctcagctcaccctggctggctcccacaggaatgaccggtggctcagacaaggcccccattctgaggggccagggcccaggcaggaggaaaaggggaccggggtgaggcagaggaggcaggtgtgaggatggagacccaaggagcccacagccagtctggccagtcccgcccaccaggtcttctgcagatgaaatggtccctgatagcacagaggcaagaggggcagtccagggcccacccacacctctcaggctcctctacaacaccccacagataagacctagcgtctgttttgcaaggaaagtaagttcagcctagggagggcaagagacccagatcacagcaagaccaggaaggtctggacttaaccctggcacctgactccaaactcccttcccctgcccaccctggagccaccggtgggcgaggccggcttcgccctgagcactccctggggcctgcctcccagctgccacctcccagccctgcgggatgaattggctgccaggtgcccagctcccacatcaggccttggggaggggacccagcctctgtcagaagctgcgtgtctacccaggggcaggcagtcccacccccagcttcctgcctggaagggtccatgtggctgggaagccaggtgcagggcttctgcctcgggctgcagtggggaccacaggggcccaacagaaaccagcaggtcacaagatgctgggagaggcttgggaggaacttacaagtgcccagagccagacagaaaacacccagcggtgccctgtgggccctggaagcggggtttccaggacatcttcggggctcccacctctggcaatccttgggccaaccatggaagctgagtctgccgccctctctgtaaatggggccctgatgacgcctcccaacggcctggcaagctcagggagctgggctggaatcccacccacccaggcctgcatcatggggccacctaacactgcagggctgggttctgcgaccctcaggacctggaaccccctgcaggcctggcagccaacccctggtgccctccccgcccgccctggcctggacctgctcccagggccttgcaggttgaccggctcccgcctccacatggagaccaggccccacccctgaggctagggggcctgggagctgctacctccggaggccccccgagccctggggtctaggaaagcgtcattgaggtggggctcaacccacgctgagcctcggtttcctcgtctggacaatagaaagggtcctctgccccagggtgtgtgcagacccctaactccagcccaggctgttgggtctctgtagtgtagggaacccaacagggacgctggggattccccctggggcaacgcaaggcggcactccccgcgccagacagcagggggcgccagtcgcacacatacggccctgggagacctgggcacctacaccttcctgcaccttccgctgcagaacacaggccatgtgccagccggcccctggcacctctggcctcatctgcaccaggcccctgggctgcctgtcctgttacagcccccggctctagggggctgggatttctgcagcacaggcaggagggaagccaggagcgtgggggtgggctgtgcaagccgcccctctcctgcccgcctcactgggcagtggtgggtgccagcgagggcatggcccgggatcctgaaagtgacaccaggactagacaaagccctagtgttacctccagggcattcccggggtgcaggggcccccacctgtactagaactcagccccctcgggccacacacacctcccactgactaggtacccacttagggcagatgggcccactgagtccttgccacactgctcccagcaggcactatctttttacatgttcatacatgccttttttttttttttttttttttttttttttttgagtgagaggatctcactctgtcgcccaggctgaagtacagtggcaccatctcagctcactgcagccttgacctcccaggctcaagcaatcctcccaccccagcttccagcgtagttggaactacagatgcacaccaccatgcccagctttttttttttttttttggtagagatggggtttcatcatgttgcccaggctggtcttgaactcctggactcaagcaatcctcctgtcttggcctcccaaagtgatgggattataggcgtgagccactgagcctggcctacatgcccactttacagacaaggagagtgaggctaagagaatggcttgcccaagaccaaacagcttgtaaacaatggggctgggcgccaaacccaagtctgtgggactcctgagctggtgcccaaagtgaggataccagtgtgcaccagagagaactgaaaatagacatccacaaaatacctgtcgccaaacgctcagagcaacaccattcatgtgagcccaaacatggaaacgatccaaatgtacagcaacaaatgaaggaatcatgtgttccacccacacaatggaatagtattcagccatgaaaagcaatgaagaccaatacagggtacctgtggctggaccctgagaacaagatttggagtgaaagaagcctgacacaaaaggccacacgtcatgtgattccatttatacgaaatatccagaattggcaaatccgtggaaacagaaagcaccaaccagtcggtggttgctggtggctgggaggaagggggacgggagtgacggccgatgggtacagggtgtctttctggggtgatgaaaatgttctactgtgatgacggcacaagtctgagtgtcctcccttaggaggctgatgggtataaaccacctcccaccctccactgggcacctgccctgacagccagtggatggagggtatgggcagcagtgggcagggagggggtgtccaccccagagagtcacctgctttacccagggactctccagcatgccctcaatgtgcccatgacccacaggtagccttaaaggagacttgcctgggtctggaagggcctgtgtgccaggcagtgtctgagcccggagacggccctctctggataaccccctcactctccccgggggtccaagtgccagacatgggctctccaggccccagcaagggcctctggccctggcccctccacagcagccacttctccaggcttcatcggcccctcccacgagataccttgacccctcaacccccactcctgggggcctgcccgccgaccagccccgatcacggcccctgcacctcagttcatcccattcctgggggcctgcccgccgaccagccccaatcacggcccctgcacctcagttcatcccactcctgggggcctgcccgccgaccagccccgatcacggcccctgcacctcagttcatcccactcctgggggcctgcccgccgaccagccctgatcatggcccctgaacctcagtttatcacccggcctcctggcctcatggaggagcgacccctgcacagcccccacgctggcccctgacctctaggcacacacaggcaccaggacgcactcaccatggggccctggccatccaccccacccctgtgagcctcacttcctcctctccaaagtaggggacaccccttcatgcacagagcagtctagaggaaaaaaggaggcaagaggaacaaaccctttcccaaggctgcctcctccaggaagccttcctgaacattcctgaactctgacagcattttatccgcactctcaggccttgaggctcggcccatgcctgaggtgtgctctccagaggcctgcagggagacagcatctggcgggcctggtacatgtgagagctgtgcttgcacagcacttcccaacctgcaggccacgcggaagacttcaggacatagcactgagtaactgctagctgctattactccctcccacgatctgaatgaatgagaggcacggggcatgaagactaaggagccagccccgtgagggcatcccttggcttttcagagccctccaccatgaaacagttagagcctcgttcagccacgggactccggataaatgcttggaatatcggccattggcgggctttgctgcctgcacaggctctacagctgcattcctggagaaggtggaagggcagcaaaagagaaatcgcagagccagcagccagcactgaggcccagcaagctctgcaccgggggcctggggtcagccttgtgggcaaggggtgcagggaagagagcaggaaggggcacagctgctacaagcgcacgtgctgcccaagaagcacctccatacacggctctgcaggtgccgcaacgagaacagccgatgcttcccaagcatccgctacacacccaccaaggctcctggaggcgtgaagtcccacaaggcaaggcccccagtcctaggagggcaagtgggcctggactcctgtggctccccactgccatcatatctatctacagggcacagtcctgagctaggttccacttcccgggagctggctccaagccgcccaccccattccctccaggccaggtcagccaggtaggggcagaggatacccctggaggcatcaggctggtcatttcagtgcagaatccacaaacctgaaccccaagctccagggctggccgggtaccctctccccaccgtggccaaggagtggcacaggctaatgagctgctcagagggacaggggctaggcacgggcagccctgcgcacgtggcctctggagactgccccgcacctccagcagtgtcaacccacctggggctccgcctctaactgccacactggatgggacacggacacagggcctagggctggggctgaactcaggcacccagatccttgtgcccctccgggcaggtcactggcccgcctgagcctcagcccctcatccagaacatgtgggcttttttggggtgcacactcacgttctgcagggagtcctggtaggagggcggcagggacgcaagctgggactccgagtggtagggcgagaagcctttccgcagcgtgcggaactctccggagcctgcctgctgcaggggagagaaggagaggggttagacggagggccaggctgaggaggacaagggccctgggcatggctcctcacggcagcaggggctgctcaaaggcacggccccggaggacccctccaccctcccctccacaccgcttatccatcccccgagccgggatcaatcgatcttcactctccccagctcaaatgtcagcgatccactctccaacgtgggctttgtaaacatttgttggatggctgaataaacagaatgaatgaatgaatgaagaagagccagtgagagcgagtgaggagagagtgtctctcccaccccgtgactcaccctggctcctccgctccaacttcctgcccttgggtccctgcacagacggcaccactcacagggcctgggccagccatcggcagcagatggggccacatccacaggcgaggcctcccacctcccacgggttcggggctctctcgggatgctccgcccaggctgcctcccccatcggatgggcagggagctcctaaagcaggtcctgggtgctgcctctgaatccctgagaactcgtgcaagctgtggggttgtaactaactcctgcacacaggagggagggaggaaggcttggccttagaccctttgcttaagagcaaagcaaacaccaccgacccccagaatttggggctggggctgggaccaggagccagaatgaatccacaggtcccataaacttctctggtcagtcccacagtgcccctcccctggcccggcccagcagaaggcccggcctttcttttctttctgcatcactaaagggttttgggtgtttctggccgaaacacccttttctacttcaaaggaactgagagaaagtggctgggcagataaaaccctgcggaatgtcccataaatcagcaggctgttgagttacccaaacaaactgcaggggcaggggaggcccaggctggggctgggctggggcaggggcaaggaaggcaggacaggctgcagccatgtctggggtcccagttccactcaccagcccctcggcctggctgtgaaagatcccacacacaccctgcttgcctccctcaaaagctggacctggccccgcacttctcacaagccccagcctcactgaggtccagctcttgtgttctcccagccccatcagagccctggccaggccccccactggggctgggaggtctcaagagcttggctcaagggccagcaaacagccgtgtcctgcgggggtgaggaggcaagtggatgctctattaccagctcccacggagccaagacaggaaagcagggatccggcactgactcccctcattaaatagcccacgcccaccagacgccggtcagccagggcagccgggcactggaggctgggagctgcttcctgggcctcagggaggacctgggtgtggtccaaggtcagggagggacataaaggagagacagagaagtgggaaccaaccttcctgcagggcccccaaagtgtgatgggttttagataaccctggcgagcatcacaaaggggtctcagcacgggggccttgggcacagccctgaaccatcaaatgggactgccatgccctgaccacggcattaaccctggctgaccctgcctaggttaactagaggcactcacggcccgcaggtggaggtcagatcaaggaaagccccctccccacccaccaggtaccaaaaagaggaagaggctacagcccccacccctaggcccagcactcaccctcccccaaccatgagtgacacccctccccccaccccatcagagccacccatgcctctctgggtcacctctcctgagagatgtacccctagctccacttaagggcgaaaattccaaaccacctgattttcttggccaggactctgcaacagtaagagagttacaaaatcttctccaatggagaatgcattctaagccagcacacactctgaatgcgtgcgtgcacatacacacagtctgactactgggccacacagccaggaagggtacacctgggattggaacagctgccctccccttcagccggccctgccctgccctgctcagcttctgtttggactccggcgtcccttcctccacatcctctctggccctcgaccaaatgggctcccacgtgctgttaccgaaaacgcaggtttgtgctgccgtcccctcccctcccccagataatttccctgggaggagatgtgtgtgcgtgagcgtgagggaggtttttaattagctgcacgcaattcccacccttgccttcggtgagcctctataaacatttgcatgtccatagaactttattagcaagccacaaagccaggcaggaaaaacacacaatctctcattaaggggcaatgtgactaatggcgcatcaaatgagtaaccattattgcacttaaatccaaattaaaaatcctgctatgagacaggtcgctgcctttgcagaatgagattccctaggatttccccgaggaggggaagcaggagctgaaatcacctgctgggcttgttctgcacacagagaagagccccagctaaggaaggtgctggcccttcctcagggggaggcagggggtccactgccgctccccagaaacacccacctgcccagtcttcctcgggtggctccctcaggacccagggagaagggatcttacacacagagctgccagctcagagctcaaacaagatttcccgaatccttaacagggtggggccagccctgccaaacactcagcgtggccccttccaccctggccaggcccaatccgcattactcacttctagagcctccagagggcagcatgagtgtcctggactagggaggaagagacccaggaggttgcagggcctccttttccactgaggaccggagttcaggacacctccagcctgtatccagggccttcactgcaacactgcccaactcagggcccagcgaggactcgctgggtgaactccagttgttccccagccctttctgggcctctgcagtgcggcccagccttctccccagaggggaaccccgtcctgcagcgaatgcctgcctgcaaagctgcagggggcctatgtggggccaccctggggtgacccctagggagcattgtcagaggggatgctgaacagaaagaggataagacatggaaacagagcccacccaccccagcctgcccacctgaggctgcttgtttggaaaggatgggtggggtggctgcaggcaggaagcgcctttctgggctgtgcttaggggagctgctgtcaccctgcttcctgctcccagagagcttttgggccctcaaatgtgctgcatcggttatgtgtccgagaggcacaaacagagcgcctcctgtgtgccaggcaccacgctgtgccccatcagggaggctgcaactaaaggggagtgagggctgggggtgcgggtggaggcaggcactgaagagggggtgccctgtgtccccacctgggcagcctgcccgcaagtgaccacttggaccaccagactcgaagccccaggctgattcatacagaatgccctgggaaggagtcctcgtggaggggccacctggcgcgactctggaccggtgtctcagtgctcggtgcagggatgggtggggacctgcgaggctcctccctcctcagcaccctccaggatggctgacaggtgagcatgggcccttggcaccgtgtggcacagcacagctcggctcagccggacagccaggtgtggccagggtccaggaccacagtggacagcaacgcagccacatccctctccccctcccaaatttaggtcatgccaatgactgtgtctgacttgggagacactgtggggctcagggagaggaccccaacacaggcctcccccagcccagactctcctgggtcaggtgccctcctgcttctggcctgtgggggctccaggggatctgtcacaagaggccagtttcaccgcagctgaagagcttgaaggtgccgtctgcagggaggggcctacatccaccctcagagcaatgggaacctgggcaggaaaaagccacatgagcccaggccccgtgcagctcctgcaggcactaacaatgcctctgccctgagcgtgtgctaagatggtctccaggtccccgtggtcactgtgcagtccccaggctgggatgggagccaggttggaggacagggagctggagagagctccttccagttcacatttcccaccaatcccactcccacagataagccatcatcccaggggctacggaggcgagaggtgagacccagggagcaaggccacggcccagtgaccaccccgtccccaagacctggcgacctccctccaggaagaggaagtgggggcaaggccagggcccagggaacaccccgtccccaagacctggcgacctccctccaggaagacgaagcactgtgggagctcccagggttggtcagtgatgcgtaatcaatggtctgggtgccgagtaataaacgcagggcctcagtggcctatcaggctgacacctccacccaggaagtgctggaagacagtgcaccctcagctggctgggctgggggacccacctggaagcagaggctcgaatgcgtgacttggggagaccattctcccaccaggggccccagcagctccaggggcagctggggccacagactagcctgggctccactgtccggccccaaactaaagcccaccgagatccagctgtcatccgtctcggagatcctcagagggagagtgcagagaaagcagggaggatgcaggacagggcaggggtcagggctgtgcagcgtagcacagaggcctccacagaagacaggcctcaacttgaccccacgggaactgcaccagagttgttcccacgagggcacgcaggaggtttgtgtccacacgtccgtcagtcatgcctgtgggctgctctggaaggggaggtagacttggcactgtgtaatgacgttgttggtttatcgtctgtctgcatggctggacaggtgtggttcacctcccagcccaagcccagggctggcacacagttggtcactggttctcaaatgggggtgatgcccccagaggacaactcgcagtgtctacagacactttttagtgtcagctcgggcatggggtggaagacccccggagggtaatgcggggcaggtattctggggcgggcagtctcaggacggggagaaggggacagaaatgaaaccatgtggagacctgagagctggcaggagagtggccagtgcctaaagggcctggctccacgggtctcgaggctgggcacaggtgggagctgagttcacccagcagctccccagtcccaggccctgtccagcagggatctggctgcagcccagggtgcctggcatggtgactcatgctgaccctcagaactgtgcaacccacgcagaaccctcagcccagtgcccacccagctcagcagccctggagacctccctcaaggacccaggcagcttcccaccgggagccacagctgggtgggcatgtgggccccagcctcgtctccactaactcatgcagacttgcaagcctcttctccctccgtgcactgcaggtgtctcacttcaaagtggggattagcaccagccctgccgccctgcagaggcgggaggaccccgggcacctgggcaaggtgcgtgagaaggggctcacaccacggagagccctcgggggcggtcgctgcatcactgtcttgctattattttgcaaaactggaagtttcgccagtaatgccagctcgaggagagggcagatcccaagaagactctaaaggcagggccagcgcagcctgggaaggaagtgctcccaggaaagaacgggagggtgctggggagtaggggacagagcacacagcagcgcacagcacacaaagcagcctcccgacccccacaaacaccactgcaaacacgcctcccaccaggcagctctacctgaagccagcttctcgggcggccgtaggggcggggcagctagaaggaaggagaacagtgtcacccagtaaatgccaaccatgcccatcactctgcccagtgccttccctggacatctattagcccaaagccaccaggacctcagctgagccggagtggttttcccacaccgaaggccagggttggggctcgccaaggcgactccaggagctccacgtcttcagaaactccagattcacaaggactcactgaagacctgccatgtgcccggcactgggtccctaggagcacccaccaccccccatagcccaccccaaaactcacaccagggtggagccaccccaagtgccctgctaccctcccagggaaaagcaaacctttgagaagccctgggatggggtgccccggcctagaggcaccccaagatcccagcagctcagagaggccaggtgggggatgcacgccctatctggccccctgttctagcctcaaggcaaagatgacctgcaaggtcgcccacaagagctacacagtcataccaactggatttactttctttttcttctttaattttgagagaactcatttgtaggggggaacaacacacactggggcgtgttagggggacgaggggagggagagcatcaggaagaagagctaatgcatgctgggcttattacctaggccatgggctgatctgtgcagcaaactaccacggcacacgtgtactcatgtaacaaacctgcatgtcctgcacatgtacccaggaacttaaaacaaaagttgatagggaaaaaaaaggaaaataaaaaaagaacaagggggctgccgcttcagctgggggtccagagacatattcccaatctgcactcagatcaggcggtagagatgaaggtgcggccatgtgtggctgatgtcacttacccatggctggcactgctcctcccttggtccccatgtcatttcacacccgaaatcccatttttcaaactcacgtgtatgtgccattcagggtaacaggcagaccagtcttgtccaccacgcagaccatccctcccttcccaggtccctctgcaggcccattacttgttccagtgaggtaagtgagggacaggcctgtgggagctttgaggtgtgcagttttgtgtgtgtgtgtgtgtgttttgtttcttttgtttttttgttttgttttattttgtttttgagatgaagtttcactctgtcacccaggctggagtgcagtgctgcaatctcggcttgctgcaacctctgcctccaggtttcaagcaattctcctgcctcagcctcccaagcagctgggattacaggtgccggccaccatgcccagctaatttttgtattttttagtagagacgaggtttcaccatgttggccaggctggtcttgaacttctgatctcaggtgacctgccagccttggcctcccaaagtgccgggattacaggcgtgagccactgcgcccagctgaggggtgcggatttgcaaaaccaaatcctaccttggctgagtaagccagagcagctcctcaactttctgggcctctgtttgtttgcacataaactggcatcaggcggaggctggcggaggctatggctggcccacaatggacaggaaagatcacggtggttaacccgccacccttaccgccaaccgcccgactcccagtccttcccacaatttgccttttcatcctctgaacaatgtatgtgtcagacaccattagtgtccccattttgcagagggggaaactgaggtgcagagaggttaagcgacctgttcagtgccactctgctggcaggtggcactagtgagacttgaaccaggccctctggcactggcatcctgcacttggcctgtcagccctggtgactctcccccagcatctggctcacggtggacactccttacactgctggtgctagggcacggaggtggaatttcctgtctccattctgcccacattgcgagactgaccatctgttcattggctggaaggctggaaagagggggtttcctccctgggcaagggagaggccaaactgactctgaggttcaactaaggaagcgtttaaagtcctccagagacccaaagactacactgcctatgacagaggtgatacggtatggcggccaacccaagatgccaaacacacagggcagggaagggcttggagcctgctaccaaggcatggaaacgctgaccaacagagatgcccacgtggaccaccgcgacgccagcatctccggaggaacccgggctcaggacagcccatcctcctagggacacagaactgaagcgttggccatggattcagacagcagcagatcgatcccctcttccccgccccttgaagggctcagaactcaaaggacaaagagcagcggttccttggggatgggccaggcccaagggacagcagagggcacatggtcagccagacctcgaaagatcccaggcccttgggaccgcctggggtgcttcccaggggccacatcacactgcgctgggcatcacctcccaggtgaggacactgagactctgggagagagaggatttcacctgaagccacacagcaggtgagcgctggggcgggggctattggagtttacagggagaagagcctgtctacaagctgaggagagaggcctcagaaggagccagccctgctgatgccttgatctcagacttccaacctccaggactgtaaggaaataaatttctgtggtttaagtcccccagtctgtgcaactctgttatggcagccctaccagacgaatacaacatccatgtcaggaaatccaccttcatccagacctcagtttccccatctgtgcctagtgtgaattctgggtctctttcagcagccctttggtacgtggcaggccaggggagaggtgggcacagcgtgggggaagaggggagaggaggagggtgggctgggggcccttcagtcaccagcccagaccccagcctcgctccccaagctggccctctggtctagggagagagaatatcaggagagctccctgctcttttgtaaagctggcttttttggcgcacaatggagtcttcatttatcagcccagcaggggagttaacgagaggccccagcgtcaattacagccgcccccagcccagcccggctgggcacagagaatccacaggaaaaataagaatgcacacggagtcttgagatgaatcatcgtggaggaagcagctgtgttgatgaaattttaaagccaacatgagaaagaaaatacgaacagcaatacagtaattgagtctgtgaacatgctggcacatttttaattaaacctattttggagttaaatagaggccatgggtgggggggggggtgggaccgcggggagtaggaatccagggaggctccctaccctcccacccaaaccccaaagccacgtcaccttatgctattccagagaagagcattcctctctcctgcttttcaccaacaggaagagtccctgctttgcgcagaggtgggggtttctgtacaacttgatttccctgacaagatttaaatgccagaatcacagaatctcacgagccagagtccatgaggcttaggacagcatctcattcaaggctgtgaactctttcttcaagattcccaaacatagtcacccagccatctcttgattatctccaaagatggtaccctcactacctgctgaagccctcccttggttaagtgggccttccttattctgagcaagaacagcctcccctcttggccgtggagactggacagggatcagccacaggctccccaagacacatccacccagttcaaccatgctgagcactggagacaccaatgtggccactcagaccctgcagccctgtcctggagaagatgacagtcccacaggggtgggggccaggatccacaagggtgggtcatgacaccctatcagcaaaggtgggcagcccagggactgagagagctcagggcaagcaccaggccacctgtgggtagtcagggagggctgcagacaggaggccaggaggatggagactaagtaaaccccatcttcctggcgcctccctgagaatggggccaccactttcctcacaggcagtgccctgccacgagctctcttcacctcccctatcctccaggggcctctctgtgcatgtgggtcctgcgggctgggcaaggtggtggtcaggcaggaacaagggtgagactggcctgccagccctgcatccccagggccacatacatagtaggtggtcagttaaacactgagtgaatgagtgcccacttctcagatgagcaaacacaggtctgggagagaaagtggctcaaggatccccaaaaagctggcgccactgaagctgccccaggaatccaaaggcaggcttgggacccactgctgccgagagccaagggcccctccctcaccccgtctctctgtctctctctctcctgcatggctcagaacagcagtgccttcctccatggccagcaggaaccccacccatgatcccagctcctctggttcttcttcttcttcttctttttttttttttttttgaggtggagtctcactctgtttcccgggttggagtgcagtggggcaatctcggctcactgcaacctccgcctcccaggtttgagcaattctcctacctcagcctcccaagtagctgggattacaggcacgtgccaccctgcaaggctaatttttgtatttttagtagagacgaggttttgctgtgttgcccaggctgatctcaaattcctgacctcaagtgatccgcccacctcagcctcccaaagtgctggggttacaggtgtgagccaccacacccagccgtggctcctctggttctgctgatgccatgggctctggggatgccaccagctcctggagcctttgttatgaggttcaggggcctccactgcagcatggggacagggcaccggggccaaggccccagcagcatacggctgcctcctttcagggtactgggtatggccctgacaacacttgctgggagccccagggcaagacctctgcctgctgcagagtccatgctgagaaagcagctagggatgggccctgggtgccctcctgccacaccacacagagatacaagctccttcagcgaccactccagcagcatggcttgactgggcatcatttggtgagaaagcaaatttctgctaaagaaacaaaatactttgaaccctttctgcactggatgatctctgaattccgcgccctggttgtatgtaacaacaagcaggcaacagtgggtttctgtccctaaattccagtccaactgcctgcagccagcaagcctgtgtccaggcaagggtcagcagctccccagccatcaggatctgatgtcggtgccctgcagacctggcccacggatgaggatgtgaacagagccctgctgctacccccagggagctggtgggagcaggcctggggaggaagaggtccctgggcagagccagcccgtccatccttgaggctcaaggctgaagctcccatctacctccacctgtgcacaggtgggtgcagggcaggtggacacaggttatggtggagggccccctgtgagaccggggggcaccccaggaaggaaggcaggaagaagggctgctcctccacagcccgcttgggcgcaggttttctgcaagtccgtggtcaggaactggggtgtatttttccagtgggacactgtggcctgcaggggccaagggatcagggacactcctgtccttatggaaacaggaccatgagctgctctctggttggaccgcagaacacatttctcatagaaataacactgcagggccgggcgtggtggctcacacctgtaatcccagcactttgggagcctgatgtgagaggatcacctgaggtcgggagttcgagaccagcctgaccaacatggtgaaaccctgtctctactaaaaatacaaaactagccaggcgtggtggctcatgcctgtagtcccagctactcaggaggctgaggcaggagaattgcttgaacccgggagacagagggttgtggtgagctgagatcacgccattgtaatccagcctgggcaacaagagctaaattccatctcaaaaaaaaaaaaagaaagaaagaacactgcaaacagcatcccaaattcagagctggagcttccaacccacttctccacaggaacaatgagacaaagaaactccagatcagggcagacgcgtgaggtcactgacccgggggcccgagcttcagccaccagagcatggtcctggcccttgctctgcagagcagtagcccctgccaccacccagaggcaggactgcctctcctacacactgcatggggaccttctccaaagcaaaggtccctaagccatgaccttctcctggtgtcacttctgcctacagcttccacacaccctccttagcaaccacaatggccccgccaggtctgcaatggaaggctggcgtctagggagccccactccacagacaggtgagaccccagcccctcctgccctcaccagccctgggaagccagcacggcctgtggccaaagcccttcaccatagggcacctgacagcaaggcatgaaattacaaaagccagccttgccattcagagcttggctgtgcacttgcgcctgtatggtggtggggagtggggggcggggtgtggaggagagttcacaagaggccaaatgaggaacgtgcactctgctaatcccaccaggccctgggaaccttccccacagcccacaaaggggtgagacgtgaggatgacctcagtgggagctgtgctccctgctggggccgtgagcctcccagcagccgcccagtgggcagagagggtgccgtggaattcctgagctgggcagtcggcaccaagcctggctggtcacctagcaacagggccaggcagctgagccatccctgcggttggttcccagagagacgccttgggtatcccaggctgaccgctcacggcgcagtgggaaaagcagggagagggagactgggatgaagccagggatgcgcacgagggctcggaggcttgggggagcgagcggcttgagaggtcgccaagccagctggcccccaacacccaagcgtgactgcccatagcctcctctcggcagcccccacgcctgccccacctgcagcagggaaagcccttgtcctggcagtcacacgtcccctccaagctccagccacactcaagaggcacagcccctcacccaaccccacctcccccctacagccaacccctcccacgccgtgcccctgctgcccagctctgcacaggggtagcagcctcatctgtctgtgggtgaggtcgggcccaggagggaggaggggaacccagcccagggaggtaccggccagtgagtccagcacggcagaggcggggaggcttccgtgtgagtctgccccatctcctgcctggatctgcccatctgccagaggagtgaagcagcccatttcttcatcaactgggtgttgtccaccctctcaggccctgggccagccctgaggagctcgcatactgggcagtcagcatggaaggttgggcagagggaagcccagaggtgtgggagccagggttaggtccctgaccccactttccaggaggtgacaggtggcagtgggagcagttggggggacagcctaggtcccaaggggaagggtgccctgggtgagctggaggggtgggtgctgggtcgcggtcctcaaggcagcgccacccgaagccggcctacctgtgcgaggagcttgtcaccctccagcagcctcactttgctctccagttgcctgatgtaggtggatgagggatctggaaggacacaagaggaagggggacattagcctccagcagactccatccccattgcgcaaccccgactggccccagacccggcatggaaggtttgggtctgaggagtcccaccccacagccaggtgacgccccagcccctccgagccctcgcccgccctgtggaaacagcacggcctgtggccaaaggcttccggccatagggcacctgacaccaaggcacgacacacagaggccagccttgcaggacccgctgctgccctcgctgtgggcctctgagcccttctcaggaccttcaggacctgtagaaaggtggggggtgtgggggtggcctcgccagcctgccctggagcaattccttcagcttccaagatgctgcaggctcaaatggagctctcacaaacacagccagggcacagcccaccccagggtcggggtccggggagccccctcctctacacagtggggaaacagactcctgaacttgccaagtcagcatctgggatccttccagtccacttcgcctgatcacccaggaacttctcacaagctatgtgtgcccacagcatatgctgcaggtgagcagccaccttccccatatgacagtcgggaaccccgtggaacaccctggtcatgtgtccccagtttctgacctcaggccaagggagccctatctatgcagaccactggtgcagggtgaaattcacccaccctcaccacactgaccctgctttccagtcacatcaggaaaacacaaaaaaatcccatccccacccccacgtccagccatcccatacccctggtcctgcctccccccaggctgggagtcagctcagctgccaggatgcccagggcaaaccctcagggcagagggctgggggaagggaggagaggcaggaacgggacccagaacacaggccgggggaccacccagcaacagcaggtttggaaggaggaggcaagggggaagcaaggctgtcccaagtacccctgtgagccacgaagccacctggtaagggatgggttattaacatctctcgcagagatcacctggcccagatgccagcccagaccccatccaccctgacagctgtccacccaccggcccacccgacaacaggacgcagggtcttcccagattcatgccgctcaccctcgattgcagaagcagagacatcagcccctttgaccacacacagccagctatctagtccccatcaccacctcagggctggggatggactccacaggctgttaacatgcctggggggacaggggcttgggtgctactggggacaagccaggaccaccatgccaaccacaggaccaatgaagcatctgtctgcccccagcacaccaataaaaggatgcttgggagccccctattcagccctggaccaggcctagggcccagcagagccactggcccagccacaggcaggagcaggtactggagcccggcccggccgcactcactgctggggaagagcgcaaaccagcctcccctcctcctccagcccagtcacctcccaggaatgtggggccttctagagaggagagaagggcagctccccatccaggcccagcctccccgccctgccaggcagaccacccctgccctcagggtgacctcagagcctcacacctcaccagccctgatccctccctccctggcctcagtttactcattactctatcaaccccgacaaacagttcccatgcccacccaagcaaagcggtgtgatgggaagaggcctcagcattcagggtgtgctgggtccctctgagcatggggaggtagggtgcagcctaggctccccaaaccttcatgtcctgtaccctactaacaggagggctccctggaacaccagctgggaagcagtgaccaagtaaactccagagacccttccggctccctcactctgacagagctaggacaagaacgcaccaatgactatggacccacgtgtggggtctccctctgggtggagtcgggtggggggtacccactgtcccatgtggaacacgtggtaccccctgcatctgatgccttgcaaaggacaagcagctaccatcctcattttccaggtgcagaggccacaaggaacaaagtgtccccaccaccagcaggtgagccttccagcccctctccccactacccaggcccacgccacaggtcagtctttaggacccagtgtttctggccaccctgggcagagctgacagccccagccttggagagaagctggcagagactcagaaagaagacgccattcccagtcacaccactctcctgaaggctctccgcagcgcaatcctcagcacggccacagggcccctgctcaccacagcacccccatgggactgtgctcccggggatggccctgagccagggggaggacccagccactgtgtgtgaccaacagcccaagatgggcactaacttgttctctgcccttcgctgccacagaaccattcaggaggtgggtgcactttcagcccacccgcctccccctgctggttcccacagggtgagcgaggagctcccagcacttccctctccatgagcccacaatcggaggagggatgggctggaacccaagtccacagctgccccgtcagcctcagcaccttcgctgggtgacccttctcctgtctgagcagtccgccccctcagatacaactggggtttcacacccacttcccagtaagggttaaagacagtgatcaggctggcaggtggcatccggagaagggatgcagacaggccatcccacaggtcgccagcaatgccctgcctgcccatagccagcacctcacctcagaacccacaggctaccatcccccacatcgggccacctgtaggcacagacaggtggccacacacccacggccccagaccaaggggctgcccctgacagacccatctgttgaggtttaccccaaaccccaggcagctatgcagaataaaatacactgcagaccaccaggcttcattgggtttttcttttaaatttcaaaataacaacataacactcttaaaaaatattttagaccatccagtaattccagtggaatctatcctaaagaattaattctaggctgggcacggtggcacatgcctgcaatcccagcaatttgggaggccgaggcaggtggatcacctgaggtcaggagttcaagaccagcctgaccaacatggtgaaaccccatctctactaaaaatataaaattagctgggcgtgatggcaggcacctgtaatcccagctactcaggaggctgaggcaggagaatcacttgaacctgggaggcgggggttgcagtgagccgagatcacacaactgcactccagcctgggtgacagagtgagactccatctcaaaaaaaaaaaaaaaaaagaattaattataattatgaagaaagcagacagagtggccaaaactggaaataactatttgtccaacaacagctgagggttctaccctgtcatcattaaaatgatgtttagaaagtttctctcctaaacaatatggaaaaacacttaaaatgccagtggaaagaactggacacaaaatgacatgcacaatggctgcgacgtttaaaaatatccaggcattgacgtgagttcaggaaggaagtccacagaaatcctgactgtgcggctgctcagatgagggaaccagtgggtttttatttattcacatcgtttcttgttaattttcaaataatcgacttgtagtctagttctgaaatccttctttcagaaaaaaagaatggccgggcgcggtggctcatgcctgtaatcccagcactttgggaggccgaggcgggcggatcacctaagatcaggagttcaaaactagcctggccaacaaggtgaaacccccatctctactaaaaatataaaaattatctgggagtggtggtgggcacctgtaatctcagctactcaggaggctgaagcaggagaattgcttgaacccgggaggcagaggttgcagtgagccgagatcacgccactgcagtccagatgggcgacagagcgagactgtctttaaaaaaaaaggggggggaacggattaaactcttgcaccttcacattacatgcatggccacccaatgaagcaatggacattttaaacccaccaccctgaccctctccccacactcagctccctagaagagctctccaggctgccaggagccagtgagccgggcgtcagtcacccttgggtcaggagcaggcactcttcagacaggaagaacaagagtgatctgggcactcccaggcgggggctggagggcaggagaccccgggaagggccggctccccgggaggactgtccttcctggcagcctcaaaactcgtgatcccactgggtgcctgcaagccccagcctcttggagatgagcgggtaattaagttaatcccagggtttacagtaatgagtgctggagccacaggggaggggacatcatttcccagcttggctgcctgagggcaaaatgagggaggtgaccctgggctggcctggccaaggggtcccctggggtgctcccctaacccgtctgggggccatcggaccaattctgggggattccctatccagctgccaaccggggaggagggtgtctccctacaacgttcttgtgtccaggagccagacctaagctcccctcaccccgccctcttcatggatcccttgctcccatgaggagggggtgggggaaagctgtgcagcatggtggggggagtcacagagcctgcaggtctgccaagccctccccattggcgctgtgccggctccatcccagataccctgcactgggtcctgccactgggaccaggactcactggccttctgggaagctgtgaggcaggggctgggtggtattccccctcctggcctggttttcacactggcaagatgatgtcacctccacctcccctccagactttgctgtgtccagaacagtaagaactggggggccagaagccatgtcccatcacctctgtgaccttccttccctagctcagcacttggcacacagtcagcctccagaaaaatgtctgcagccctaataggaactcatccctggagggacctgttcttagctgcctccctggctccgtcccaccatctcccaccagaaggagtagctgcaatgagctcctcaggagcgctcagccatgcatgtgacacagcaccccgcaccccaagctggggaaccccagacaaggagctgccgaggctacagggggcagagcatcctgggctctgggcacacgctccttgcatctgactctgcggtgcctgatgctcctgtctcacacacgcctccctatgatcttatatctcaggttgggtgcagactgagagaggaggaatcaacttcacgtgggttatgtgggtggcaaccccaggaaacccagggagaggggtagagaagggaggcagggaagggaagaagccaatggaaggggtgtccactctgccggtgagctctagggctcggagtcaccccacctgtccaatggttcactgggagtattaacgtcccagcactgcccaagaggagaatggacaggaagggctcctgggcagagctgcaggtgccagcaggcgatacagccgtgggctcagaaacaggaagtgcctcagggatcagggctgggcatcaacagtgtctgtgaccactcaggagaaaatatggtttatcctctctccatagaaggtggaggctgggggcgagggagctgcagtgacacacagggacacatggtgacacatggtgacacacagagcctgactctccagttgctgtgcaccctccccaggtctgcctcccagcccctccccctgagcaaggccctacggcatggcttcccagccctggtcaatttctgcaaggtctggggccaggcaggctcgtggcaggtcattagcaggagacctggccactccaagccgcaggcctccatcggggctcctgcccagcacctccatgggccctgtgcaagacagctgataccaccgttcagcgcagcagcttggctgattaaatccccttctccttccacttcattaagaggagtcagctgcagcctcagggctggtggctccatgaggtggaagggcctcattaaacgaacacgtacttcccacaaagtgcagaaacaaggtgcaaaggtgcaccaagtaacaggcagggcagggccagggagaaccgggctccaggctcttaagccagtgctcttggtaccaccaactgcggggagctccaagaaccagggacacggacggagatgcagattccagaaaaacccgtccataaccatattcatctaccgaacagcaatcgtgtggcttacacacattagtcctcaacattcctcaccatgaggcaggtgaccaggcccccccagtttacagatgaagaaactgagggtcaaggaggcaaagtggcagccacagacccagggagtggtggcctagaggctccgggtagcagccggcctcctcttcccaggcagtcctccccaccctccagctcagcaccacccatcctgggctggaggcaacagaagggccacactggccacacatcctgcagtgccccctcctacccagcaggcactaacccttggccgctgcttcatcccgaggtggccactgcccgcatgccaggcccagcgggtcctgcagctgcatgttcctggccgccctacacctctgaggcatgagcacttcgggtttcccccagcgaggcctggggcgctctccttgtgtgggttcaccaaagagccctgtgagctgagccaccagagcctggggacggccccatcttctcgagggacttgggagataccgcaactccaggcctgcctactccctggatcccagcattccaaagggtcaccaaaggacagaaattcttggagagcagagagaatcctctaatctgagacccaaaaggagttatcgatttcatcacagtccaggctaccagtggggtggtgagttccccatcatagggggagagaaagcagcggctgaacagtctttctttgggcagaagcctctggaacaatgaaggttcccagtatggcaaaggaagctgcttacctaccccagtgccagaagagctaactctgctcctccaatctccacaggaccctgccatgcagaaccccgtcttacaaaggaaaaaaggaatgctcagagtagcccaaggtcacaaagccagccacccacaggaccagcgggggtcggcgggcaggggcagtatattattggtcaaaggcacatcccttcctgtgagggacccttggcctaatgaaggagctgcaagaataaccacatctactgcaacgcaaagagtggagcaaggaggcgcagcccaggagagaggggcagagaacagggtgtgctgaccaggagaaatcagggcctccttcctgaaggaggtgacactcgagctgagcactgaagagcaagcaggactctgacagagtttgtgaggatggggaagacgaaaggcacataggagctgagggcacagcctgagcaaaggcagggaggtagagccacaacaggtccaggtacacctgtgctgtgccccttagcatcagtggccatgccaatcccagctgacaccagctcctggaagggatcacagctctcggaggggcaggctgaatgtgaaacgggcattatttatggatgaaggcaagaggcctgagagagggcatcgggttcctgtgaggacagcttttggcggtggctgcatggagccaggcaggcctcagtgcccacagcccacaaatgggcatgcagggtgttgcaggccgaggcagctggctgcaagctcagcgatgccttccagtgccctgggcgtggaaaagagttctcccatccacttggggcataaagaagagaaccatctttcccattcgcacacacacagtttgctgagtacccaccatatgccagcacacacggagcacaaccccatcacaccaagctgacgagggacatcctgtaactgctaccactgtgtcatcgacaaggcgcctgagactcagcgatgttaggcagcaaggccaaggtcacccggcgggaaccttgcagggctgagatttgaacctgggtctgtctacagccaaggctctctccatctaactcgcagcttccacaccaaccccggggttctggcgcactgaccctgggcctctcaagacatcatcaccatggttgtcagggctgttcattctaagctttgcctggcaaggaggcacagcaactttcacctactcccccaacaaagagaccgaggttccgaggggctccataaccacccagtcacagaactcataaaaacagggctaaaatttgaagggtgtgtgtgtgtgtgtgtgtgtgtgtgtctgtgtgtctgtgtgttcccacacccaggactcttctagacaacccactgaggcaggggatggggcttggaagacagcctgactcccctctcccagagcagaaattctcttcgtgacgcaaggtgactttcagggcccaggctccagggagcgtcactctgaactccattatccttgacccatctctcctccgagacctcgcctccaagggcaccagataagcgcccagccccagatgtgaaaagacttgatgttagtgaggttttcagtctgagccaaagaccccacagcctctgagcctcgccaggtcacacatggcctgcaggctggcaccagcttcccctgagatccacctccatgcccggagacatgggatcatgggaacctaaagtcccacctcgcggatgcatgcaaaaacggagctgccatgaccggagccccacactctccatctcacacttccacagccggattagaaatcaaacacgccgaggacacccttcccagtgcctccagggaaaaaaagtagctagagaagaggaaaacgaacggctgccctaatgagaatgaaatctcctggtgctggccggtcagccttccccagtgagtgcacgcctgtcctctcagtgtcatctgtcccctcgtgggccactctgctctgggctggggactcccacaccggctgcctgcctctcccacacatcagctgcctgcctctccccagcttcaggggccactgggcacccagcatttaattccaggaaaagccacgaggcttcccaatgacactgcaatgtggagggggcagctgaatggaaagccccgctccggctcagttcatctagaatgtgccctactttggatctgcctgggaaccaccagtgttctcaaaccaaaactcaaactcatttctccatccgctgcttgggaagcctgacaagccaaatgaaaactgtgtaattgcttcaaatatggggacaaggggaaaagaattccttccctgtgccttcaagggctgcacgcatctggaaattgacctgtgtgtgtgagacggtggtgcaggtgtcggcactgttaatgcccatcacactcccctaccaaccccaacttcactgctgaagttgggaatcagtgatagatctggactgtgtgcagacatcagctagtcccgccggggagagacatctcaccacacagcggtcacatcacattcagcctgcagctcccagcatcaggctgaaaggtacgccctcctggctccttggagagcttttaaaatctgatctcttcccctgagactaactggacactctaggggagggacctgggcatcagtttgcattttaaacgccctgtgggtgattctaacatgcagctctgtggtcactgttccaatcatccaactcccagcctccaactccgagggaccctttaccctcctgcccctgactattaattagtggagctgaactctgaagcaaaggcaaaaaaagctagagggattatgatgcaactaatcgcgcaggactgaagtctgcatggggggggggaataaacaacccttaccgagccctagaacgcaggtgccaagccccccggtagcataaaggggagaattttgctggtttcaggagaaagtgtgtgggggctgctttcatcactagatgtcaaccaaatctctatcgagtgccaggctctgtgggaagagctggggggccgggatgatgccctgcccccacagctctgccccggagcctgctttcctgcagagttagtaagaacagtggggaggcgtgggaggggtgggacatctcagccacatgcagaggtgggaggtgcagcaggtggaggcggctcaggaaacagggaaatccaggcttggctgggtcatcacagccagcactgggagagcggctcagggaaggcacttgatctgcggtgagagcagtggtgggaatccaaggccctgcagcaagagaaagagggggctctgggcggttccatctggcagcagcaacacatctggactgtgtttcactgaggcaatgaaaacaagaataaatcctcaccagccaggtggtaggattcctagggcgatgggagttcagagaagacagctctatgtgcaccagactctacaggaaagataacatagccacgtggagaggcaaggtggagcccagaaaagacccacacacctggtgtgtggccacggtgccggcggggaaagaacagagcgcttcatgaacagggctgcagtagcaacaagctgtccacccagaaaacagtaaaactctatctcagcctcacaccatatacagaaaacagttccaggaaggtcagagagttctatgtgaaaaaactattttgaccaggcacagtggctcatgcctgtaatcccagcactttgggaggccaatgtgggaggatcgcttgagcccaggagttagagaccagcctgagcaacatagcgagaccccattgtgatttctttttttttaattttacactttttttcctgaggtcagccatggtggtacatgcttgtaggcccagccactcaggaggctgagataggaggatcacttgaagctaggagttcaaagccgtagtgtgctatcatgcctgtgaatagccactgcacctcagcctgggcaacatagcaaactcccgtctctaaaaatcataaaataataaaaataacaaaaacttcggcttttcttatattacaggaaagaagtgagacaccaaagatcgtatactgtacgtttccatttatataaaatctccagaataggcagattcatagagacaaagtagatgagtagtttccaggggctggtgcaggcaaggaggggatagggggtgactgctaatggaaacggggttcctttctggggtgactaaaatgatccagaattagatagtggtgataagtgtgcaactctgcgactatactgaaaaccactggattggctgggcacagtggctcatgcctgtaatcccagcactttgagaggctgaggcgggcagatcacctgacgccaggagttcgagactagcctggccaacatggtgaaactctgtctctactgaaaatacaaaaattagctgggtatggtggcgggcacctgtagtcccagctactcaggaggctgaggcaggaaaattgcttgaactcaggaggcggaggttgtagtaagccaagatcgcgccactgcactccagcctgggtgacagagcgagactctgtcccaaagaaaaaaaaaaagaaaaccacaggattgcatactttcatatatatttatgggtatatgtgtgtgtgtatatacacatatatatatacacacacatatatatacatatatacacacacacacacatatatacacatacatacacatatagcatacttttagtttgtgaattctatctccataaaactattattttaaaacaaagagaacattttaaagaaaaataaaaacttgagctttcaggtagaaaaggatttcttaatcaaggaacaaaaagaacaaaccatgaagggaacgaccgtgaaacccgactatatgaggattacgaacgctgccagagagtggctaggtgagcagagttggacaacaagctgccatctgggaggagccatgtgtaagtcccctcccagataaaggatcatacccagaatccctaacatcaataaggaaatacatgggaaggggcagaggtataggaagaggagagccacaaaagacgaatcctggatagccaagaagtctgtgaggagacgcccaaccgcaggtgtcatcaaggaaacccaattccgacaatgagatgccactggattggcggagagtaaaaagtggtcatgctgtgtgacggtgcacacgtaagaacgggccacacaggggatgctgatgatcggcgcagcggatcagagagcagcctggcgcggtttcctgcagctgaagatgctcacacccttgacaaagcccagcacaagcgcccaacgagacaggcacaagaccgtgtctgccaacaccagctgtactagtgaaaactgtaaaccacccaaatgccctccccaggagaccagacaaattgtcgtttaacccaacaatgaaatactgtagcgagataaaaatgaacaaacaagagccaggcagaggggcacactcctatagtcccaggtactcgggagaccgaggcgggaggcgtgctggagctcaggagtgtgagtccagcccgggcaatctaaaaaaagaccacctctaaaaactaaaagcaaaaaaacccaaaacaaaaacaaaacaaaaagatgaaccaaatacatctcaaaaacatgaagaggatgggggcaagtcactgagggacacacagtgcgatgccatttctacaaagtctgaaaatctgcaaagcatcctcacattgttagaggcttgccaggcaggagaaatttttaaaaactgcacgagaatgctgagctccgattctgggcctcagctctccctgggaaaagtcggggagggaggaggatgacacacagggtgcctccgctccacctgccaagcttgatttcttaaaaggcaaagatctgaagctaaaatgcttattgctgacagtgtgataaaggcgggctgtggagtaatcgctgtctcattattctccaagcttattgctttttatctatttcttaataagaagtaagttaaaggaagaaagtctgggcggctgttctagaaaagatgctggaaactcctcatgttgtaccacttcctccccgggtccccattcctgggctgcatatggaaatcccacaaacacccccagcagtgacctccttgggtgccacccactcccagaaggagtagcccaacagcagcagttgagagccccagggagatgaggggttcacaggcgtctggctggaaggtggtggtaggaagccacccaccagcacacagaggccagagcaggccccctctttgccccaacctgctctgtgaccttggacaagccccttccctttcccaggccccagagaaatgagggcaggaggcccagataactcagaggactcagagggcaggacaggaacgcaactgggtctcctgcgagacactgtccccgaaattaggcagagcggagtggacctgcccggttagaagcgagatagactcagtttgaggacagcaaattgggcttcccgcgtttcacataaaactaacagcagggtgattgttgaccgaaatgatcatcaacaagcctggcttaatagtgccatcctcccagaggtcctggggaggacacattcttccagccgtggagaaggaccagctcctttcatgcgcagggcatgttgcaagaggagataattggtgctgagcaatgcaaacaacacaagctgtgtgcccgtgagggctgctgcgatctctgttcagaagaggcagtgtagtgcgggggaagaaactgggtcaggagtcccagccctggcagcgccctccatgacacactgggcctcagtttccccaaatgacaacacaagggccttgttctggataaagttctcagcctgggcttgtgaaccgtagtcagcagaataacaacccctcaaagatgcccccaccctaatcctcaggatctctgaatgctatctgacctggcaaatgggactttgcagatgagatcaaggttatggaactcaaaattaggaggagattagtctggattatccaggtgggcccaatctaactgcatgaatgtttaaaaacagagagcctttccccgctgagctcagagggagatgtgaccacggtggggtggccactgtaatactgaagatggggaaggggagaagctggacagacagggaagcgggctctcccctctggcccctagaagggaacgcagccctgctgatgccttgattttggcacttctgacctccagaactgcaagagaataaatgtgtgttgtttaggccaccagggtgtagtcatgtgtgacagcagccataggaaacccacacaagaactacaagtcatggctgtgtgactttaggttgcttgcttagtcactctgagcctcggtttcacttaaaaatgagataaaaacccaaccttaggagactgcagtgcagactaggagaagaccagctccgaaagccctggcataggacctggacttagcagatacttcacaaaaactgccctgttccccgactgctcacactctaactgtccgaccttgatggaaaggaagggccagctgaggcctgcacgctgccctctgagccgagataccagcaccagctgaccatggggacagcggtaccataacaggcctggggtgcccaggccacactcctccaatatacgactgctcacctgggtccagctcgaccaagctgctggcaccagcctccatcaccaatccagcaaaggctaccacatcactgccaacattacccagtgcaggcatgcacactgcaaggtgatccaaagccaatgtggtatcacccatacagcgcatagcctcttctctattctaaagttgaggttttgtagagcatgaagtactggaaccactagctgcttgtgacataatgacaaaccaatgctaattccatatgcggcagaggagatgccctcccagccctaacggagtcctggggtggggtgagggtcacagcgtacacggagcactggggctggacagacactagagattggccaccaagttcacaccaccagtatgcgcatcctgccagaggccacacgggattggaggcagtggggggaaggtcacatgaacaagcaagcaggtgaacaggtgaatgagtgagcaggtaggtgtgcaggtgagcaggtgaatgcgtgagcaagtgagtatgcagatgagcaggtgaatgagcaggtgggtgtgcaggtgagcaggtgaatgagtgagcaggtaagtgagcaagtgggtgtagaaggcagtgtgcaggtgggtgtgcaggtgagtacgtgagtgtgcaggtgggtgggcaggtgagtgtgcaggtgggtgtgcaggtgagtgagcaggtgggtgagaggtgagtgtgcaggtgggtgagcagttgagtgtgcaggtgggtgagaggtgagtgtgcaggtgggtgagaggtgggtgtgcaggtgggtgagaggtgagtgtgcaggtgggtgagcaggtgggtgggcagatgggtgagcaggtgagtgagcaagtgagtaagcatgcagcaggcaggtgagtgcaggctgagaccggagtccaccagccaggctcagcctcccactccccagcaagccccctccctaggtcagagcctctagggaaaagggctcaagagacagcccaagccaaattctagcagacaggtgggaccagcgacagcagccaggtcccaaaagaagaaaggaaagcagaggaaaagtaaattccaggccccgggcccatgtggcagtgaggacctgaggctaagaggaggccaaggaggatggccttggtcccagacaacctggaggtctcatctgaaagcctcaagggtgggcactaacccggaacctgggggtccaggtgggaggctcaggaaggagtggaggaggcgaagctcctcccaggcccggctagcctgcgccccaaaaagccccaaggttgatcaggctgtgagccccctctagctgcccctgcaccactggggaggaggtaggcaggacctgggccacactgctaggggtgctgcaatcctgccctacggcccaagcattctgcggaggctgacacacctgccctccacaagggtctctgggggccttcatgagactgaccccagcaaggcaggaccaggcccttgcagggagggggaggcgcaaacctgagccccacagtgcttcagagagagcctgggcacagagtcagcaggtctgtgctggctgagtgtgttgggcaggagtgtctctgcccaagcctcagtgtcccctcagtccggtgggacgaggtcagactctctagacctctcaaagggaaggccaggcaccctgaaagcccccttctggagagggtcctggccagctgaaggtgctggcactgacggagctgttgctgtctgaggtgtgggaggggttgccaagccaacctccacccaggccctccccatcctgtcaccacttcacgtgctcagctgccaatgacccataggccaggctgcctttcacccagtaagtgcagctggaatcatcgccctttggacccaaggttctccccgcaagggggccacgagcttccggggctcaagggtcacctgctcaccttgggcaaggcttggaaaacccggtgcttcctgcatggctcttggcaccgtgacatcactgggtgacccaaaataggactaacagaccaggagctcattgtcctgctggccagggacttggttaccccaggccaccagggatggcctgggggtgtggccctcaatgggagaaggaccctaggcttcccctagcagtgccggatagaagggaggagaggcctggggtcagctgggcctctgtaatcacagaaacactggtctcacatcacagctgtgtgacctcgcaccagtgactgaccgtctctgagcctctcatgttctcatctgtaaatgggaaggatgaggccccctcactgagccgccgagaggatgctggatagattccagaacacccaggccagagccctgcagctcaggacatggggagaggaatgtcacaatcttctcacaggcccttcaaaagtcttcacaagcacaaactccgggttcaaatctcacacgggggccactaattccctgtgtggttttttttttgtttgtttgtttttgagacagagtcctgctttgtcgcccaggctggaatgcaatggtgcgatctcagctcactgcaacctccgcctcctgggttcaagcgattcttctgcctcagcctcccgagtaaatgggactacaggcacgtgccaccacgcccggctaatttttgtgtttttagtagagacggggtttcaccatactggccaggctggtctcgaactcctgacctcatgatccgcctgcctcggcctcccaaagtgctgggattacaggtgtgagccactgcacccagcatggctcttgaacacgtggcatccctcagcctcggcagcgcctctgtaaaggtaggctgttcaatgactgcatgccgagcccccaagggcacagatgcaaagccctgcacagaagcccagggctgggctgagcccctgcggcggagatagggcaaggacccgaggctgagggcagggtccacccacgggaacagctcccctgagctgtgctggggacggtcccttctccccatgacctcaagagatgggctcaaacttgggggacagagggtccagggtcctgcctctcccatcccaggaagccactgattctgcactctgggagagtgcaggttgcgggagggacaggactgtgtcttgctctcagagctgctgcagaccctctccccgccacccagtgtggtcggctccacttgctctgtgaatctgtctacactgctttcctgcctgaactctccggagccacccaccccagcttcagtcccctgccccatgccctcagcccacaccctcagctccagtaactgaagaggactgtggccatcccagcacacgagctcccccatggcactgtgcttctaaccaagcccgggactgtggccatcccagcacacaagccccaccacggcactgcacttctaaccagatccttcgtttctagggagatacacccccacccagccttggtcactgtggcaggcaaggcctccgcctgagtgtgcccgcccggcacagcagaaagcctggcactggagtgtgcatgtccctctgcaggctcctgcagggctgtgtctggcacagcgtgatctgcagccccagctgtggcaggcgggcagggggtaagcgcatgctggcagcccgcacatcactgcatgctgccagctccaagcaggtgacagcaggaaccgttagccttgctgtcaaatgaggaccccggtcaatgggaagccaccacccacaggcccaggtctgacctggtccccacccaggctcaagctcctcttctcgggttgctccagcctttctgcaggatcaacacctaactgggctctcagaaaagccaacgggcatgcctgaggtcccaccttgaagctcatcatcataaacggggcacagggcacccacagtgagtggagtagagttcatgactcctggtcctaccacctccttgctgtgtgactctgagcaggtttctttccctctctgggccccagagcacctctctgtacaagggagttgagagcttccaaggacccttctggcagcacaggtgggcacagatggacataggcccatgggggcctcaggtctggtgcctgcccacaagactgtgtttctttaagaaaggtatgagcaagaacagacttgaaggtcaggggagagccagtgccaggatgaggtcaatgtttggttactgatgagaacaaacaggcctcagtcctgcagagggtggccttgctggaagtgaggcgggcgggacagggagctagggagcctccctctgtgtaatcacgcccacaggtgagaggtgacagcccagctgctgagaactgccccaagccaactcctggtctcaacagggaggatggcgtgggccctcagagcctcatgggatgggacaagtgggccttaaaggtcagcctgtccccacctgtcctaccagcaggatgaccttgggactctagggtgtccgccggcttgtccaaggctacaggtcaagtcagtggcatggccggggtgacaacacgtgccctggccctgccccacagctgtcctatgagcacacacacctgggccttcaaatcccttctcctccctggcacacagccacttttttctcccaggccaagtggcaataatgataataagagccagggattacagccctgttggatgaaataaaaatcctgagtccacgctgataaaaaggcatccatacatagctcactgagggaaaggggaagcggccctcccaggagaaggccaagtattaaatgtggaaggaggtggaaggacgggagaagttagaaaatcagcatcgtccccaccagacagctaactgtggatgctgagacaagtgcgtgtctgcctgctggagaccaagacatctgcatgtctccaagagcctcccgcaaaccagttattacttacagagatttgtatgctcagcttacaatgggggaccctcccaaaccacgtaatcaagttcacaccccaagatgcacacctcaggttcccctgatcagacacacgtcccttgtgggctgttcttgcccaaaatgcacagcctgaacctaatgacacggaaacatcagacagcccgatcggctgatcttctaccaaagaaccggtctgtactgtcaatgcagttggaaaaatgtcaatgtaaagaaagattgagacacagctccaaatgaaggaaagctaaagagagaatggaccacatatgatcctgcattagaaaacaatcactcaggccgggtgcagtggctcacgcctgtaataccagcactgagaagccatggagcaaggatcacttgagcccaggagttcaagaccagtctgggcaacatagcggcatcccgcctccacagaacatttttaaaattagccgggcatggtggtgcatgcctgtagtcccagctacttgggaggctaaggcgggaggatcacttgagccctgttgaggttgcagtgaactatgatcacaccactgcactccagcctgagtcacagaatgagaccctgtctcttaaaaaagaaacttgctctagagcatcatattgggacaagtattaatagtatcaacgttaaatgttctgatattgatcattttttgtcactatgctatatgaaagttctcgttctttttttgcgacagtatctcactgttgcccaggctggagtgcagcagtgtgatcatggctcacctgaaaccttgaactctgaactcccaggctcaggcaatcctcccacctcagcctctcaaagagctggaaccacagacatatgtcaccacacccagctagtattttttatttttacttttttgtaaaagtctcactatgttgcccagactgatctcaaactcctgggttcaagcaatccgcctgcctcagcctcccaaagttctcggattacaggtatgagccactgtgccccgctgaagtcctttttcttaagaaatgtgtaccaaggtatttcgtgtgaaaggggtgtgttaactctaacgtctctaaaatacttcagaaaaaaaaaaaagtccagagagagaatgataagcaatgaggtcaaaacagttggcaaatcgaaatgaatgctatatcagcaccttttgtacattcttgccacttttctgtaagttttaattcatttcaaaagaaaagaaaaatcttcacctccatttatagaaccacgtgggaggtgttatgctgagcactttacctctgttaccttctcagatcctcacagtaaccttcggagaaaaatgcaattattcctattgaaaagtgaggaaactgaggctcgcagagatgaagagactcatctaagatcacaaagcagaaagtgctgtagtcgggatttgagcccaaagccctttcccaaggcccaggctctaattcaccagggcacgtggtctcagagatcgtctaccaggtacagcccaggctgttctcggctggaggaagagacaagagctgggttaacaaggccagcatctgagggatgctggtcccttggccactgcctggctcactctgtgatcctggacaggtgagctcacccatctccctgtctgtgccatttccccatatagaaacaagggtcatctagtgtccatctttaaacatctgccagccccaaggcaaaggctgcatctggctcttcaccaagtcactcctgggcccagcagaggtgaagccaggctagaaggagacaatggctcagagaaaggaatgcccagggtacaggtggctcccacatggctcacacatgtaatcccagcactttgggaggccgaggtgggtggatcacttgaggccaggagttcgaggccagcctggccaacatggtgaaaccccatctctactaaaaatacaaaaattagccaggtgtggtggtgcacgcctgtaatcccagctacttgagaagccgaggcacgaggattgcttgaacccaggaggcagaggttgcagtgatccaaggtcgcgccactgcactccaacctgggccacagaataagactctgcctcaaaaaaataaagaaaagaaaaaagaaacaatcactattttagtccgcacccttccaaacataacataaaatagctgaaaggatgaaatatcacagaagaaagtgcgtgtgcagcttaatcttaggggaaaaaaatatcaaccaggtctacttcagtggtctatttaagtcgattctggaaaaacctggacaaacctccacagtttctcagggtctccttgaaaccacgaggtttccagtgtggactgatggcagagaactcagccgtgtgaaagccactggccttcatcatctgcccaacagcagaagagtcactccacctccctgccacctaccgtagcaagccgagcagtgtccttccaaattcatgtccgcccagaacctcagaatgtgatcttatttggaaatacggtctttgcacatgtagtcaaggtaaggtccagaggagaccacactgtattagggtggccctaaatccagtgactgcacgtgaggtcaagagttccaaaccagcctggccaacatggtgaaaccccacctctactaaaaatacaaaaattagctgggcgtggtggcagttgcctgtaatcccagctactcgggaggctgaggcaggagaattgcttgaacccaggaggtggaggttgcagtgagccaagattgtgccactgcactccagcctggagatagagcgagactctgtctcaaaaaaattaaataaaaataaaaacaattaatccaatgactggtgtccttgtaagagacagaaaagggcaaatggaaacagaggaggccggatggaaagaaaggcagacatgggagagatgaggccacaagccaaggaacaccaggagtcatcagaagcaggaagaggcaaggaaggtgatgtggtttgaatctgggtcctcacccaatctcatgttgaatgtatccccagtgctggaggtggggcctggagggaggtgaccggatcatccgggtggtttctgatggtttagtgccaccccctattgctgttcttgtgatacagttcctctgtgatctggttgtttaaagtgtgtggctcctccccgcactctactcccctctttctcctgctcccgcctgcaagacgcacccgcctccccttcgccttccgccatgattgtacatttcctgaggccaccccagaagctgagcaggtgctgccatgcttcctggacagcctgcaaaactgtgagccaattaaacctcttttatttataaattacccaatcttaggtatttctttacagcaatgcgagagcagccgaatacaggagtccccccgagagcctccaaaaggaactggccccgctgacaccttgactttggacttctggcctccaaaaatgtgagagaacaaatttctgttgttttaagacccctagggtttcccacgtgatcgtttgctgtggctgccatcacaaatgaccatcataatgtggccattcgtggtagtgccgtaggaagctattacaccttctcttatagatttttaagggtaaacatgacatcactgacgagagaaggctgagcaaattccagacacacttcgtcacccaccacatttgccatcctgtgcaactttctgcctcatttcccaaagtgacttccattgaggtaactcggagccacctgccacagcctccaaaccgatcacaacttcaccagccagcagtcgcctgttaaccaaaaacactgcagtgaggaaggctggctgtctcttccatcagggagcaacgtgcccatgtctagcagccgaggagctgttaaggaaattctagttaacccgcttgcagggttgtgatgtagccactgacagggtggctgcagactaagaggaaaaatgcatctgatgcagcgtggactgaaaaagccagattccacataaacccacagcaggtgggcccgcagccagcacacccctgcccgggagagaacacacagatcaatctcaggggaaagaaatcttcccagcagaggccacgggactgggttgcatgggtctgggtttttcttctacatttccccatcttcctaagcttctctagggaacacatcccctttgaaattaaaaaaaaaaatcaaacctgcacctaggccccactcaccccctgcacacagccaggtgttctttccctccttgtaggaacctactcacaccagctgccccctggatagatgctccctggacaccagggaaagggacccaggacctttcagcccagagtggcctccaccaaaggctgccctcttagcaaggaagggggtctgcccacccacacacgcagccctcatgcctgcctcatgcctgcgggcaccaacgctgcagccagggctgggtagggtgaaggggcagccaggaggtgggagggtctgggccgggagagcctaggacagcccatgaatcttctgggcctcagttttcccatctgtaaaatgatacaaaccacacactcaacgagatccctgggagggatgactgctcacagcaccatcagtggaacctcaggggaggcaggagagccatgagtaccacacacagagactccagggcacctgtatgccaggcgccaggcccggccccagcactgcttctctattctcagagcagcccccagaccgccagcatcacgcccgcctcacagggaaggggctgcgcaggctctgtccacctgggcattcaaatgccactggaggagggtgcagagtgggctgtgctcgctgggcccggtgtactcaatgcacgcctcctccctgctgccccaaccctatggcctagagaaaggtcttgagggcagggaaacaggtgagagagtggccgcctgggcggagtcgcagaacaccaagcgagcaggtttgttcatcaacagccacagaccacctctgcccgataccagggcccatgggagccaagccatctctgcagaagggaagcaaggtctggagagggacgggcctcctcagagaacagggctcccacaaggcctccacccccaggcccacagggagccttgccagggtaaagctgcctgtgtccactagaagcctgggccgggccacaggacagttcccctgcctccctcagtctccacagggcagggctgcatttgcagagagggctctgctgctcccttcggcagaatccacaagccactgagtgctgaagccccacccactacgtgcatgggggggtgcctgctgccacacgcctccagggctcccgacaagccacatggccgtagcggccctggcttcctgggacccaaggccaggaggaaaactctgaaaggtcagatgtgaaaaatgccaccagacccaaggtcaggcagggagacccagtgtccaggaacacaggccttagggacaccagctggcacctggtcgctctaggcacagagcatccattcctacaaacccatgtcacagagagtggacagccccgtgaccagctggactggcatgtggctcagcaggggtggggcctgggcacctgcccagccatcctccacggcagcagagcgctctgctggtacttggtctccctccaggggacacctacagggcagtccctcccccactggaaaatcaggtcataaatcagcattactgtcctttgttgggcaccaggggcgggcgccatgcagtggctcctggctcagaccttgcaggacctgctctgtgctgcgagcgggcagaccctccatttctcagtctgcagatgaggaaacagcccccaggggcccaggcgcacaccacagccacccagggccccagcctggagaacccacaagctccaggcactgtgcccagcacacatgaagctgggtaaatgtgggaagggggcagaggagggatgccaggtgggagcagggagacggccttaggttttggaacccagctgtgaaagaatcccctgcgctacggcgttggtgagattaaacgaaactccactcagtagggaatggcaccaagggggcctggcccttgcctggcatgcagtgacgtgcttatcccctccttcctcatccctcttcctgggctccccacgcgaggacctcagtgcagagccactgactggaacacctgcttccttcagctccacctattcacggaaatgcccggtagggagccagcccagtgttaccccacaggtgaggacatgatgatgtcatcatggcccacgtcttctgggaaaaggccacccttccacaaaacaaaagcacaaccaggcagaagagagcgacgccctccagcaagctgaccctctgcccccgggcctatgcaaaccccctggctacctgggggtccccaggtcctgctccccatttcatctctgcccatcaccttggctcctgcccctccctcctctggcacccctgagggcagtggccagccagtttcacccttctacctccacaagccctaaccaagtgccacagagccacagcgcaatgccacacaatcactgaggaacagtaacgcgctgctggacatcaggcacatggtgcatgagatggacatggccaccctcactgtacaggcacaaaaaccaagcttctgaggaagggcagttggccacagccacatagggccagagctcgggtttgaaccagggctggcccacacaggaggcgatatccgaaacctgcctaggttggcctggcctctgggtgaaacaaaagttaatccaggacagggaacccccaacctgggtgagaggtgtgtcccaagggttctcacggaaacagaaggtcacaaaggagccacctcctcctccatccctcctgcacacctcaccctcacacacacatgcatgcacacacgtgtgtacaaatgtatgcacatgcccacatgtacacacaaaggcacgctcccagaaacatccacacacaagtgcatattcacacactcaccctcatatgcacacacacacccatatgcacacacacacacaggtatgtgcacactcacacactcactctgtctctccagggtcttgacactgcggaaagagtattgagctggggaacagtccaggggtcatttattttaattattaaaacagcagccacttactctcgagccgtctataatgccacttaattacctagtacataaaacggcctttgcatcttagcagagtaataaatcagctcagaaccagagtttaaagcatccaagctgaagattctggaagggtagagggggatcctttgccccctccactccccaacccaagaagcaataaaacagatgcctcagccatggcagggactgggtgcactgggaggccaggcatcctccctcctgcttctccgtccactcctcgggcctgggcccctgccctgccgcgttccatcctttgtatggtcaacaatagccccgccagatggcgcggtgcagggagcagcctctgcaaggcaatcgctcatgctgtcaggacccagcagggctgtgggcaggagacctgggaaactggcccaagccacgcccccctcaccctgccctggccaccttctgctcctgagcccacaggcacaggcagcttcgagcacaactgggccatctgggaataactcgggcaggtacatcccccaaagggggagccggcagaagcaccagataataaggtggtcactctgcatctgcaagatatagggaggaaatgggagggtgagagagcaggcagggagatgtcaggcaccatgcttcccacgaggcgggcagaaggcagcggcatggcgctcaccagccggcagacataaatcacccactcccgtgggccgtgctggcctccatgtgccagcatcccttgtgcctctctgtgggcaaggggacatgcaaaatggcataggcaggaaggaataaattcactgtgccattcctgggcacgagccagatgggctagcagagtctgccctctgagcacggcctccagggtatgtggggcagggggtgggcacaggtccttggcaatggaaccctgggctgttcccaaacttggccatttcaagcatcgcttcaagtaagcagcctgggcacggaccatctgcaagtgtataagcagcccgttttcctgcaggaaaaatttccagcctacatgtacacaggtggtgggattgctggttgaaggggacttgcctttgcaattgtctagaaatgaccagattacgctccatagaggctggacctcactcccattagccatggaagagagcactgtctctccacagaagtttcttgttttgttgtttgttctgcgcagtgaaggggacagacaggtggagacctcttcgcacccactgctgcgtccttgctgctctctggtcctgataaccaagaagcaccagggtcttgcactctcctccttgcaccctccccagacccacaagatggaagagggtggagaagccagcagcagcagggcccagctgaccccaggacatgccccatatgcctgtgcccaccttgcagcatgttagggttttggtcagcaggagcacgtccgcacttttctgaagcctcctcctccatggagccttcctgatttccctattgagttgcacgacaccgtttatctgtcctgggcgccagcacctctagttcttttttattctatctcatcttgtaatgtctctaccacctgactctgagccccccaggggggcaggccccagctggctggtgtgtgcatccccgagggcctgtcatgcagtcccagtggcaggaagtatctggctggggcaatcaggaggctgagacagtactggctgctggttcgtccaggcccatctcacaacagcaggaacaacatccagccttttaaggccccttggcaaccgtccaaattaaattttccttacagaaggctaggaacccagccaacctgagccttctggacagactgagttcagcttagagggacactggacacgggtggggagggcgtggggacaagtgcagagaaaacactcactggagaacgtgcactcgtccatggaagctccagaaggtgcgggatctgcgtggcggcagctgccacagggggcaaccaaccgccttccaaggagaggggacgcagaccctctcccggcagcccgcggcctctgatcatgcagccaggcggctgcacttggcttttagtcatgggccggtgagctcactgtcccccaactggttttccaccaagagctgctgaaactaaagcatggccacttggggatgatgggacttggccctgttcttgggctcgctggagcccatccccctgcattaattccagctgcccctctcaccttccacagctcgtcgtgtgcacaatcccctcctcctccaccacccctgcggggctcagctctgagcaggctctctcacgccatggaggtctgacccccagtgcagagggatgcctgggttggcaccccctggcatgcaatgcctggcacaatgtggagaagggaaggaggaggaggaaagccttcaatccctcccataaaagggagacaacctagaaccctctacaagagatcatctaaaaccttagtagcactggcctggacaaattcaagttctagaataactggaagcctaaaaattaggttggtcacatgctccaggtgcatgaacccaggggcagagtgtgtctctgtgattcatgcagccaggagggaggctgggagcgggggcaggctgcatgggcagccgggaagagctgcctcctctctccctggtgcaggtggatacagaagcccgggaggacaccggcccccaccccacctgcctaataactcattgtctggctgttgggttcatggaagagtctatagtggacaccccaacccaagcagaaaagactccagaagagcaacaaacacaaatgggtttccagaaggccaggccagggaggagggtggggagaccccagagaagaggcaggatgatacacgagggcatgccagcagcctccaccaatgcaggggacggtggctttcagccgcagggctgctgcgcccgtctgctccagccccgagcccagaggcacaatgagctgtcgtaacgcagcgccgaaatgtcctgggcaccgctgaccatgaggccaactgatggagacaactctgacagcaaacaggcaacattatggagggtcacaggagactagggaaggaagctgcaaggggctctgtgctctcccagccctacgctccagaatcgtactgaatgctacttgaaaaggaaactggtctttcctgaccacccactcggtggacgactcactcctgccagtcagcatcactgccaatgtcttgttggcatttaccatgtgccaggcacagggccaagcacactgcatggatcatctcagacctccaaggtaagcactatcagtgccctgttttacaggtggggaaaccgaagctctggacagtgctgtaaattacgtactcaccaagaatggttcctggtagcctaagattttgaatccagggctgactggctcacagccgggatcttcagggatacacccctggcctcccacctctcctcccctcccctccatccggagaggtggggcttcaggttcacactgacctccagtgtgtgcaaggtgccaaggtccctcggctcccccaggtctcaaatgcctgttctccctgcctggccccatgaactctgcacccatttacatcaggacagcctcatggaatcagtgtctgggcaggcgcccacctcctaccaggcacctgctaccctgaaaaggcctgtaagcaaactctgccccacgtccactggccaccatggcacctgggcagcatttggcatgaaccaccccatcacgtggtccctcccaacgagggggcctgcaggaggcaggcagcaggggcctctcagggtgaccagggccttggacatttcactgtcctgcaccctctactgaagggaaggggcctagatggcttccactctcaaggtggcggcctgccgtgccctggcttcctgaggtgagcatgctagcataacatccagtacacccagaaaaccagaaggcagcgctccagcctcaagagggcccgaacccctctgccctttcaaagccaagccaagagccacccaagttcccaagtagtccaggcctagattcccctccaacgcggcccatctctgggcctcagccttgcttcctcatgtgtgagatgggaagcggtccctcccgattctcatctgcgctgatgtaggaggacagatgagtgcacagtcacaggaagagcaggttcacccacacattcacaagtcaccctaaagctcgctccagccaggcacggtctatacactgtgataaggatgtggccgcacagaacagacccacaggaacacagcagatgggacttctggtcgccccaggggggtcacaggagggacagaagtttttcgggtggatgagttgggggcgtgacaaccaggggaggcatggtggtgccgagaccccatcagggcacctgcagtttcctaaagagcttggtaaggctgtgttctcaccagcaggagggacccctgggccaggacagccaaggtgcggcagataaaactaatcttaagatagggcaggaggccggacacaggggctcatgcctgtaatcccagcactttgggaggccgaagtgggcagatcacttgaggtcaggagttcaagaccagcctgaccaacatggtgaaaccccgtttccactaaaaatacaaaaattagctgggcatggtagcacatgcctgcagtcccagctacttgggaggctgaggcaggagaatcgcttgaacttgggaggaggagcttgcggtgagcctagatcgcaccattgcactccagcctgggcaacaagagcgaaactctgtctcaaaacaaaacaaaacaaaaaagaaatgcacatgcctgtctccagctttccagcttgccaccttggggctggggacctggatcacacagggtgctacagccaaacaaagatgccagcactcttttcgacagctgcggatgactccaaatacacaagactgccccccactcccacccccagaggaaatggttaaatacccaggaactgaagcaggtctagatgcagagactccagggcactggtcccagactggcctggtccctttaggcagagaggcaggaggggctcaggctggtacaactgcccagtttgaatggccctggcctagcagccccaggccccgtattggggaacaaattcatggacagcagggaaggggagccctggggaagccacagacactctctggaggccacctgccctttattttttttttttttttttttgagacaaagtctcactctgtcacccaggctggagtgcaatggcacgatctcggctcactatagtctcatgggttcatgcgcatttctaaagggctggagtggtggggccccaggtccccagacccctcctaactcctccttcctccttggccttcctctctcagaacctctgtccgaggcagctcagggcatatcccgcctccccagcttccttggggggtgggaggcaagcccttgcacacctagaagacagcacccccactaccacaggcaagcctgcatgacgacctgaggaccccgctcaggaaagacgtggccgctggacccagtgccaaccccgagggggctgcagaggagctaacagggggcgacagggtgaaaccctcaaggaggatgccgctgggcctcgctcggggcaggagggcagggccgctgggctgcacatcccacaaatgtgaggagtacttcaagttgctttattattagtggtttggcccaaagccagacacaggctctgagaaaagggcagataaaacgtgacttcagtcagcctctccaccaggccatcaacaatgtggagagtcagcatgtcacagacagaaagggaaccgtgatgaggggacgctccagcagacttctgcagggtccttgcctcacctcaccttgaacatgggttctggaggcaggaggaacttctctctcctgggagggctggcgcctggcacagccccaggtccatgggctagctgagggttcctggggaccccaggaggcgtcactgcagacagaggcagctcaaagaggggacatcaaatccccactcctggcctgtgtcctcactgtctgccaagccccgtccccagacctagccacagcaatatccatctttaaccaaagaataaagcagtaaggcccacgtcgacccatcttcgtgaaggaagacctaaatcctcccaactcccaggggtggccctccagtacgaaggctgaaaacaaggaaccaagaaacagaaccacatgacacagggctctggtttctgaagcactgatgtccccaaaacaaacaggctgctgggccagtggggtgtgtgctcggctccaccagacagtattccaaagggttccctggatgtccacacctgggccccagctccgccaggctgccctgccccacagaggcacccaccactgcctggggatctaagcagttacggctgccccagggctgggaccaaacccacagccacaaaaaccaatgccacctacccaggaaggctttgaacagacaagagacagtgattcaacggtcccaggccaaaaagccaggacactccagagccaagagctgaacccaggcacatccagcctcaaacctggatcctacaccaccccaggcaacctcatcagcacttgagacattgctagttctttgcacctctgcttccccccaacatgtcacacaccccacatttcaggtgcaatgctccaaggcgacgcagggagggatctagacccaggcaggactgatttggaacatctgcggatactggaggttagaaagacccctgttgtaatcccaactttgggaagctgaggcgggaggatagcatgagcccaggaggtcaaggctgcagtgagctatgatagtgtcactgcactccagcctgggtgacacagcaacacactgtctcaaaaaaaaaagaaagagcctgagctcaggcccagcgttaccctgagtggttcacaggtaggcaggacacggacctgtggggacagggaggactccaggaaggaagtggggcttgaaatgtgccctcctgagaccaaatccccctgccaggcaggggcatccacgcgcagctttcacatctgttctgagtgcctcacatacctcatcccatccagccctcattgcagccctgcaatatggaaagttctagcatctccccactttacccctgaggaaagaggcacagagaagttcacaaagcccagggccacacagcaaccaatgctggggccactgtgagccaggccctggggccctggacaggtgacctctttatcctgccaggctcagaatggtcaggatggtgggggaggtgctgacctcagacagcttggcagcacctgcgtgcctggcccctgccacaccctgacccttccacacagatgaacggacaccactctgtggatgaggagtcacggcaggggccagaggggcccaggcagagcccagacggcaggggctcggggctgggcctcggatgcttctttttcagggagggggacaggaggagagggtcatgggagggtgtggggccagggatataaccttccaggccaggcaggagacataaaatgcattccaggacctcaagagagctatcctacagtccagggggtcttcccggcaccagattctccttatctagatattcaccttcccggcccctgagcagaacagaaagtgtggagctcacaggcacgtgcagctttggaggaggggcagaaagagccagacctacacacaaacggtggggcattagcagaaaaggagaagggcagagccgccccgctgggtgggcacaggcaaccaactggcctgggtggtcccaggaaatggaaaggggcctccttccctcccagtaggcgggggaaggcaacccacccctgcctcccagatcccacgaggggcttctccaactcacagccagcacaaagtcagccctggagcttcccccactcccacctactgtccggccagccctgccacccctgcctgtgcccaagtgaccccacctgccagggacactccctcttcagcagaccaccccaccctcacgggaaggaggaatgaagacaaaggatgaggaagacaaaggcagtgcagtgaggggccagccggagacagggatcatgggggaggggctgggagacaagaagtcccttccagaaccaacatgcaggactctaacctgggcctcacaaactccctccccaggccatctcgccaaggcctgcctgccagagctactggaacaggcacagccacagcagcaatagtagtagtagtaataataataataataataataatggctaccaagttacgataaccccccagctccagctgctgtgatgaccaagtgccttttgggcgtgcaggtgccagaggtgcacagccgtgccgttctgtaggccccactggaaggctgagacgcagaccaaaggcccacaggcagcagcactgggctaccctgacggggaggttcagccacgtctgcaggggagcaggcgggcccctccaccactggaaagatcaaacacagtcatggatgttaaatgtgctttgtagaatctcagattcttttcttccccactgtttgcagtaagatttacgatgccagcaactccttagagaaaaaaagtggctgggaaatggaatcacatgcacagggtaatttgtggcctgtccgggcctttgccaatgtaaatatttcaggcaggtaggtgcccagttcaatgccccctgtgacaagagcctgtctccagtgagctgatcagaacaacaaatcccacctgccccttttcttcctgctttctggcacctcttggcacatgggtggcctgggacatcacacctatccagcctcctgcctcattgagctaggccctgaagcctcaggggaaggaactggaggggacaaggagtgaggcatgtgggccaaggagctggagactgcctgcagcaggcacccttccacggggcatctcagagcgtgatccccagagcccccaaccctaacccagcacccgcaagtctctggaaggcagcggcaagggccagattccccacataccctcccaagcctgagggctcaaattcacagggtggtggtccctagaaagacctccagggtgggcttcagtggccctggccccagcagcgttagtgaatggccaggctgtggccctccccgagagtccctccctccccagggatgggtcttttcatgccatcactgccgtctcctccccgctactttccccaaggaaactgaaagctgtggcatgtggccttcctcacgggacactgcgggcgctgcgggctagtgtctcagcctgcaatcccggctcccacccccaccccaaggccctgctccacagggaagccagagggcctcacaagtataaatgatcaggtatcacacctccgccaggctttagataaaatcccaaccccaatagctcctcctaccctgcccccttcggtcaccagagtccagccacagggcctggtcagctccgggaaagctctgacatctgtcctttgctggaaaccttccagggacgacagctgcttatcatccaagccccaggtgacctggcccctccttaagaggcctcccctgccaccatctgttttctgctcttcctagcactcaccaggatatgaaactgtcccatccatggatttgtttgccagtttatccatcttccaaaggagacttctgtctgtcttgcttcatggaagtatcccaggagcatggaaacggggcctggtgtgcaacaggtgctcagtaaacggctaaggaaggaatgtctgcccaagtcccaggcagggtgggaggcacggacctgaggcagcgccttctcttagctctgagccctgccttcgcctcctacaagataggatggcagcagcctcagagcagaaggcaccctggtgaccgcaggagacgccacacataaaggcagagaacagagcctggtgctaaaaatgagaggggacaagtgaagcctaagctgtttccggggcgctcagaccaggcagggactcaggcgtgcagctgcctgggcaccgcttcatttcccccggtgcctcggagtccccgcgggacctgctgctcagcggtccagcgtcactcagcctcccgcctagagcgaacaggacctccaggtgctccctgcaggggattgagccatgggtggccaggactctagcaggaaccctcagggagccggctctgcctggtgcatgggtcgaggtgctcatcagtttcagaagctgctcccaggcccccattttcccaatccccttagaagagttttgttctgagctccactgaaggtcatttagtcttaaatggaagcagggaaccctcagctgtcacccacgtgaaggaaaaccagctgaggccatgcctttgaggtccggcgctcctcccccaccctgggcctcagtctccccatggaggtgctggctatccagagccctgctgatggcaggcagtcaccagtgaggcagacccggcctggacgttctggctcaaaggacagggtgcagccagatgccaacacttccctccagggcaggggcctgcagctgcagagcttggctctaaataacgccaacctccttgctctgcacagccctggggtggccctgcagtccccatgacacagggcagaggtgctgcctttgggtgggacggcagccctccaggagatgcacccctcacaacccacccaatccctctgcccctgccctgcagaagcctggttagagcccatagcctcactcttctgggccgccgagcactccagggcctctatgcaagtgaggggcatgcgctggggcctcccacaccctccctaggtgcaattctccttgtctcatcaactcgtctcatcctgggatgcgaagggtggtcagggacagccgtgttcatgagctgccatttggaactggcatttggatcttgatggaatgtcctaattgacaggagggctcagtgcacatgccagggacgcgcaggagttaaattctgagacaggagtgctgctctgtcctgcttctgctgtgcctgcccagcctccagaacaagaccatgtgctgcaagctgccacccagctgtgctctctgacccgccacctgccctcagcaccagcaacactagcaagacctcagcctcccaccagggaagctcaacaaagaagtgaacattgctccagggatttttttttgtctggcagaagcagttagatctgatctcagctggaatccttcctggattggaagacactgagccactctccgtgctatatcccggccacagctcactctcccccaaacaggtcctgtcacaccccatacgctcccctcaccctcccacatgctcccctcaccccatccccactcactcctcacaggccgaggcacagggaaccctgccaagttcaatccagaccttgggcagggaggcaataaagctaagggaggtggggaactcccggcctgtgaggaggggaggcagggtggcctgcgaggaatttagggaatgcagggagataaggggagagcggagaggagaggcagtggtgctgacagcattagcctgctgggaaggagcttcatgagcaccatctgatttacttggtccttgtgtccgcccgaggggcaccagccgggtcaggtggcctgaccactcacagctatgacccaggcacattactgaacctgcttccacatctgcaaaagagactggtggatggcctgcaggggattctaggaggttaaggaggtcaggggccagatccccacccagggacaggctgtagaagccattctgtgggacgctggccatcccatgggtcacccccagggttgcacccacagaccctgagaagccagtgactggtcaaggtcacagggcaaatgccttcaaggaggggcagaaagacttcctggagggtcgagactgcagccagagggtggccttttggatggcatctggaacggggcttggtcccagcctccacggggatggtcagggtgctcttccttcctgctggctggccctgcccccaggatccagccctgttccacctgagttcccgtacacaggagtcttcgtggggtgaggccgcgtcctggccctcagccagcgcagggcattaggatgcttagtgtgcattagtgactgcgccaggggagtgccaaggccctcaggaacctgggagaggccccatgactcatgagcgtggctcctgggtccccctgccgccagggcctcagccgcctactgtctaccatccagagctcagctggcaccagcgcccagcaatcactcagcgaccctcacccccttctgttggtaacacacctcgaagggttgccagaaagacctgctgagaaagggagaaaactctctcaagagctcaaagcaccacaaaaatgcaagctgccaacaccaaaggaaatcacccacaaacatatgtgaccactaactttcttccccttaaatggacaacagggtggcagccctgtatgtcccacctgccggaggaccctgtatgaattgtgcctctgcgcacagcggacctgcatgtgctgggcctgcaggctgccagggatgagcaggccatgaggtcacccctctccaggcttccactggcctgccctgagccaccagggccatcaccagctgtcagagataaaacaagacaagtagggagctggcttccagggcaaggggcccacccagggacacccaggctggaagctggtgcgctgctacacggactaacccccacagaccgcctgtggttcacagctgcctacagggggcagaggtagacatcaggaatccaaatcacctaccaggccaaatcacacacgtgggctgagatgacaccccatccactcccttccagaaactgagctgcaacagaaaacccgggggaaacccgctgctgtgaccaccccactcctccaaacctcaccgatctgtgcccgtctaatgagggtggctcacactaatggccacatcttcctccatccccaaaaagtagccacaatcccacaaagagggccaggggtacatccaaggcataaacagaccacaagtcaaactgtgaccttgggtgaggatttcaagagcccttcagtaaaactcagagcatggctgctttgcacacaggcctcccgaagcccaccctctgaccccatctaaaatccagggccagggcccctcgagggtggtcccaaaggtccccaggccacacagcttaaggcaccccttcctgctctgacatgcaggaccaagctggcccaggagaaggactgagtccctgtgagcagcagctcccgggagccccaccctcagctctgcctggagactcctgacctgtctgtcacctcccagcacaggatggtgctgtccacgcacttctcatgaaccacaccagtgggacctgcctcgctggtccagcagcttagctgagaacctgtgaggcccagggagtccacacagggatgctaggggcaggcaggatgcaaatggctccagagttcccccacacctgccccaacccccaagccttgccctttcccaccaaacttggtaggatccgggctcctgactagggctgcctggatagcagcaaacaatcgcatggcctttttccaggtttacaatcttcctacccatgacaccctggggattcagagggtggaacggactatcagtcactctacaggaaagcagaggctcagagagggtaagcaacatgcccaagacagcacagcggggcagcactctctccgggtcaccccggatgccttcagcacagctcctacccacacccactgctgagctctccctcgcccccaggctgcctgggggcacggtggacaccagcgaatgcccatgcccaggacccctgccctcccctccctgatcagtcccacagctggctggaggcctggggagtcacagcagacattgttgcggaacggggctgcatggagctgggccagttccaaaccccagaaaacaacatccctgggctcgtctcctctctggttccaagtcggcatcttactcctcactcccccttcccaggcagccctgcccacggtgcttaataaacacacactgaataggcaaccatatcactaccatttcagaaccgactgcaggccactatgcgcctccggtttcacagctctgcaggagtgtcctagagcccacttagcagctgaggagaccgaggctcagagagggctgacggcgtgtccagcaagtgggcggcagacgtggagtcacactgggctccctgggcccaggacagggtgggtgggacagacagggaggcccagggtgactccatgtctgccgcccacttgctgggcacgccgcctcacctctctgagcctcagtctcctcagctgctaaatgggctccgggacacccctgcagtgaacaagacctgtgtggggagctgaggagctgcacttgggaaggtgcaggatggggtgggaaggagtgaagtgtgtgtctgcgagtgcatgtgtgtgtgcatgtatccatgcccatacagcccgtcctgcatcccccatcagtgtgtgtgtgtgtgtgtgtacacatctccacacccatacagcccgtcctgcatcccccatcagtgtgtgtgtgtacacatctccacacccatacagcccgtcctgtatcccccatcagtgtgtgtgtgtgtgtgtacacatcacacccatacagcccgtcctgtatcccccatcagtgtgtgtgtgtgtgcgtgtgcacatctccacacccatacagcccatcctgtatcccccatcagtgtgtgtgtgtgtgtgtgtgtgtgtacacatctctacacccatacagcccatcctgtatccatcggtgtgtttgtgtgtgtgagtgtacacctctccacgcccatacagcccatcctatatcccccatcagagtgtgtgtgtgtgtacacatctccacacccatacagcccgtcctgtatcccccatcagtgtgtgtgtgtgtgtgtgtgtgtgtacacatctccacacccatacagcccgtcctgtatcccccatcagtgtgtgtgtgtgtgtgtgtacatatctctacacccatacagcccatcctgtatcccccatcggtgtgtttgtgtgtgtgtgtgagtgtacacctctccacgcccatacagcccatcctatatcccccatcagtgtgtgtgtgtgtgtgtgtgtgtgtgtacacatctccacacccatacagcccgtcctgtatcccccatcggtgtgtttgtgtgtgtgtgtgagtgtacacctctccacacccatacagcccacacctatgttccccgtcatgcagtagttcttaaatggtagtgatgtggttgcttattcagtgtgtgtatgtcaactcccatcactgtgtgtgtgtgactgtgcacatgtctccacacccacatggcctgtacctatgtcccctgtcactgtgtgtgtgagcctccacagcctgcaccctcctcttggtcatgttcaatgatttaaaagcatccctccccactgcttctatttttgcttttgacctttagttgaatgctcacagctgctgggccgttggcgtgatggtgagttcatcacgtgtaatcgggagacaggacaattttatttcctctaatacaagcgctgctgccccagcccccttccaagaccggagctggcttctctaagcgcttccctagagtgaggatgtaataatctgctggaaggcgtgaccgtgccgtggaaggctctaggtgacaggtggatgtggtccgtgtcaccctgctggtgttgacacactccctgccccacctccatccacaagccctgctggggcatggaggagggtgctctcttaccaacacttcgggctgagaacccacagactctctccattgctcatgaagcccctactgcaggtgaggaaactgaggcacagagcccaagagaggtgctcaggtcacaccatggaggcctgtctgacccaggtggccctgagtccagaggtgctcgcctgggtacccacacagtcccctgggctcctgagtgccttttcccccatgaaatgacgtcagggaaaccccctgtcctggggctgaagttctgcctccagccttggtgccaaacaagccagagaagtggcggggctgccccaacaggcaccgtcctggacgcagtgtccctgtgcacacctgtggaacctgctctgccggtggaggaagagaagtgggggaggggggcagggaggcccagtgtgactccgagtctgctgtgggctcagagatactcacacagtgagtgggacctacaggggagctggcaggggcctggggttgggggctccccctatcctgccctcccagccctggtccttctgcccagatcccagggcatgtgttcccagctgccccactgactgcctcactcccaactcttcctggagccttctccagggcgcagccccagacagcccaggcaagaaacccagaaggaagaggtggggccagaaaggtgaggactggattcgggattgaggtgggggctatggtcagctccctgggggaggcagcgggaggcaggggcaggcctgggggagtccagggcagcgggggagaggtccccacatgtcagctcctgcctgctgtcacctctcctgattccttccccatcccactcaggagtggggatgggggatcccatctcactaatgaggaaactgagacacacacggttgttggtcgttaggctgtctaccagaggtcgcccaaggccaggccaccctgcccacccccgtctggctcagtccaagactttgggagtcttggccagggtagggcattaatcacctcagcagcggaccaccatgacaaaccccacataccccacataccccggagtgagtcacatgggcagggctggccccttcctcttggtctcacattcctaaacagtagacaccttccaggaattcggtcagcaaagtggctggagctgctgggacagacagcctgtgcaggcctggcccccggcacacccagaggaaggagaggctgggtggctcaggtgtggccccggagctcggcaggcccagcccccagggacacagcccacgtgcacagtgggtgacagaccagctaagatatagtgctgtcctaagagctcaaggcagagactgccattaacacagcccagcccagacagaagagcacacctcccagagtcaccgtgagtgcagtgggggaggcaggaggggcttttggacactgaggtagctggaaaagcaagcagagggcggcatctcagccacaggctggagacatgagggacgtccccagtgaggggagggggggaagggggcggggatggggggaactggaggcggagaagacagccagggaaagaggggaggtatgaaaacgcctggctaatggtgttaaggaactgccactcatggccgggcatggtggctcacgtctgtaatcccagcactttgggaggccaaggtgtgtggctcatttgacgtcaggagttcaagaccagcctggccaacatggtgaaaccccacctctgctaaaattacaaaaattagctgggcatggtggcgggcacctatagtcccagttacttgggaggctgaagcaggagaatggcttgaacccgggaggcagaggttgcagtgagccaagatcgcgcgactgcactctagcctgggtgatagagcaagactccatctcaagaaaattaaaaaggaactgctgttcatcttcttccagaagacatgggagaggaatgtggcaaaggcatcagagcctgatcacagagcacctccaactttattttcagaatcctgaacctgatgctgaggggtccccagagagccaagtgcagggtaggggctgtgtttcaggaaagacagagtgagggctggaggagaccatcctggaggcagggaggccagctgggaggctggttccacgatcgctgaagcaaagaggaggagtgggagggtgaaaccccaccatcagcactggagaaggaatggcaggtgtgcccagtgccaccctaccctggcaaaggccacacccatgctcaaaccactgggctctccagggcaaagacctgggcaaggcaggatggacagggcctggtcaacccagagccccgtgaacagaccaccaactatgccacaccaagctggtcagacccaccagatgctggaccccgcctgcaaagaacacagcccctgaagacaaccgtggaagttctatcttccaggacagagctgccaggtaggaggacagcgtatgaagcctcacacctggggtctggcctcgctccccccacccatggtcactcacggccactccacgggtgggcagaaacccagtgaccggtgcaggcctgcctgcctggcctggggcgtccatgacccctgcctcggccaccgcacaatcgctccctttgttccccggctccccattgtctgcaattctctcgcctgcctgcgccaggccaaaggaggatttccagggggatttctcaatgggctcgcagggaaacaacctggcagtgggacctgctgctcatggccttccttgaaaggccacgaagcaggatgggggctgacgaccctttgtaaatggccccagatgtgagcagctattttaaaccgtgccatcttcgggctgcgtggtggataaggagctggtcagaaaggtcgttccatcttaacaactaaaacctgcgtcttcccatgactgaccattaccgacgcatcacggcaagtcacttcccggtgtgaaccccccttggcttctcccaacaaacctgtgaaggacatcagagcatgccccgtttccccagggggaaaccgaggctcaggaagctgaggcatatccccttatgtgacctagtctgagctgtttcagacacacatccccatgttcactcaggatcagccatctcaggtggccacacccagcgggggcggggggatgctggcagaggcctgtgtgtttccaaggctgtcctctcctgacatggatgggggtaccaggcctggccccccatcactgtcagaaaggggtaggcgcggcctagcagacacagctgcacttctgacgacgaccaccctgaggtccccagggtgacgtccacaccacggaacaagcaaacagccacttcgcatgaggtgtacaaagaacagtcagtgatgtgacaaggtattctccacctgcgcatgtaaaaagagttgggatcaaaaatggtaggaatatcacgtggcaaaatgtgtttttgaaaacggatgtcttgtctatggtcataccaccgtgaacgcacctgatctcagccgaaaatggatgtcttggataggatcctgaacagaaaaaaaaaatgttaagtcggctgggcacagtggctcatgcctgtaatcctagcactttggaagccaagccaggtggatcacctgaggtcaggagttcaagaccagcctagccaacatggtgaaaccccctctctatgaaaaatacaaattagccaggtgtggtggcgcacgcctgtaatcccagctacttgagaggctgagacaggacaatcacttgaaaccagggggcggaggttgcagtgagctgagattgcgcctctgcactccagcctgggtgatagagcaagactccgtctcaaaaaaagaaaaaaaaagttaagtaaaaactagggaaatgtgaatcaagaatggattctaattgataccaatcaatacaggttcattcattgtaatgaatgcacaagaccagttaagaagttaataggggacactgggcgcagagtttatacgagaactctctgtatctcctcaatttttccataaatttaaaatctgccctaggctggtctgagtgcagtggtatttacaactaattgatcacaatcagttatagatttctttgttccttctccactcccactgcttcacttgactagccttttaaaatattatttttaaatgccttttaaaaaaattaaactaaaaaaaatttttaaaagataaaactgctctaaaaaacaaagtttatttttaaaagtgtgtataactggctgggcatggtgtcacacctgtaatcccagcactttgggaggccaaggcggatggattgcctaaggtcaggagtttgtgaccagcctgactaacatggtgaaaccccatttctactaaatacaaaaaattagctgggcgtggtggcacatgcctgtaatcccagctactttggaggctgaggcaggagaatcacttgaacgtgggaggcggaggttacaatgagccaagatcgcatgatcgcactccaggctgggcaacgagcaaaactccttctcaaaaaaaaaaaaaaaaaaaaaatcctgggcacagtggctcatgcctgttatcccagcactttgggaggccgaggcgggcggatcacaaggtcagaagtttgagatcagcctggccaatacggtaaaaccacgtctctactaaaaaaatacaaaacattagccgggcatggtgacagacgcctgtagtcccacctactcaggaggctaaggcagaagaatcacttgaacctgggaggcagaggttgcagtgagccgagatcgcgtcactgcgctccagcctgggtgacaaagcaaggctctgtcttaaaaaaaaaaaaaaaaaaaagcacatataactaacatacacatgtgataaaatctcataaaacactgcacacacagagaaatgagtgtgtgtaacaggcgggtacaatctgagctcaggtttgcagtcgaggctgtgctgtgtcgctgtcatggtcctggctttgctaatgtgctccttatgtgagatgtcaccattgggggaagctggcggaagggtatgcaggagccctttgtactacttttgcaacttttttttcttctttttagaaaaggggggctcactatgttgttcaggctggcctccaacttgctgggctcaagaaatcctcctgccttagcctcccaagcagctgggactacaggtgcgcatagccgtgcctgacttacttttgcaactttttgtgagggtaggattagagatgatttttaaatcataattttgagcattatagtgtcttccaagtgtttccacaatgagcaatggattatttaggggcagtgattctctgtacctccaccagcgataaatcacgtggtggtggggagtggagccagtggtccaaggaccaggtgagatagcagctgggaggtgctcctgcccccatccaggcagggtgcttatccagcaggccactcggagcacacaagcatccttgccacaccatcaccacacgctcccccttgcacagagaccaaagaaggggactaccttgctccccaggcctggtggggttgatgtgtcatgttacgtcaggagaggttctagcctccctgagctcctctcaggggaatctcaggataaattaggaaggcagaactcaggcaggggtgtacagtgcatgagaagaaatctatcacatggcagacactgaaacgcaaatccttcatggctttgcagccagaataagttttcttaccagtgctcaactttcaagtccacataactgccccactgcccacagagcgggggaaaaatcacactccaaataagaactgccttggggctgggcgcagtggacgctgtaatcccagcactttgggaggctgaggcaggagaatggcttgagctcaagagtttgagacaagcctgggcaacacagcaagaccttgcctctacagagaaacatttgttttaaattggccaggcatggtggcacacacctgtagtcccagatacttgggaggctgaggcagaaggatctcttgagccagggagatggaggctgcagtgagctaagattgggcaaccacactccagcctgggccacagagtgagaccccgtcccctccacccccaaaaagaagaactgcctccataccacacctgttcagtcctcccatgggaagcaaagacacatgccgataaccaataacatgtcactgtgggccacactcacagtggtatgcagagactctctgggtgctggggtcaaaggtagttagttctttttctaaatttcctacaataaacaggaaatagtttgggaagaagaaaaagttactaatggggaaagactgcttttatgtggagagagcacagagaggtggtgtgggcaggtgtcaggtgtggggaccccagagccagagtgtagggtcaaacccccgctctgccgcttcctccactgggaccttcttgggcaagtgacttcacgtctctgtgcctcaatttgctctttgctcaaatggggaacataagtgtctttgccctgcaagggtcaaatgagtgaatgtgtaggaagtgctgagtgactgttagctattattattcctactattattgtcaccacacacgcgtcttgtttgatcctcaagagcccatacaatgggatgactgggacacctcattaacagacagaaaggtgtggcacgtgggtctgctgccttgtcggagatcgcacgggtggatgcacgactagcgttcagatgcaaagaccctccctctgggcccccttaggtagcacagaccctcggggcaccagccaggtaactaaagacctcctcacccagggcccacctggcaaggtggtgtggctgtcccagccctttgccaaacacagcagggaggttaagaccaagacccttcttccctggaccttaggcgtaaagctagaaggtggccctgctctgctgtccctttctgggcaagaccttctttccaggttgcccttccctgccttgggtggcacccagaccaagcagtaacaatgaccccacatgactcttaggcccagaatcaggcagggctggaggggagctcagggtccccttatagatgaggctccaaggagggggcacctggccaaagtcctaccacgagtgcagggcaacacggggccagggccagtgcagggtgagtgcagggccagttctcccacagagaactctgcccccgcccctccctacacccagaagggccagctcagagacgccaggccccatctgtctcccaagcaccagcaagcagggcatagtctggggagtggggacgtggccatcagcaggcaccagaggcacaatcccctttgccacaaatgcccctcacaggcagcggcactgctgaagaagatggcccagcctggcatggaaaaggtccagggtgctgaatcaccaaaacctccacctccccaggcgggaaacggaggcacgtggtgaggggcacttgtctgagcaccacactagggaacccactagaatatgctagagtgggggcatggatagggtgcatgtgacatgccatgggcttgggggctccgcttcccatctgcacatttacaacactcaggcagccccgagggttcctcctcctgaagccctttcatgataaacgcgtccatttttagaaagaaggctctttaatgaggcattatttccagatgccaactcatcactgtcatacatgagcctctccctgtctgagccaccggagatgtggacaacagcaatgtgtcggcgggggacccccagccagccactctgctctgccggccgccccttccaccctatgcctgccactgtccatcaaggccccccggccagaggaaagccctacctatagcacaccccaaatcccaccaggcggcctcagggctgggcaccacagccaagcccgcagccacgggcggcactcccgcgctcacagagggcctctgccctcctaccggggacctgcttgctcctgggggtgacagtgggagggacaccccaacagagcaatagccaaggtcccggccaggcccaccagcccctcaaggcccatcccaccatcctgaggttctggacagcctctgcaaggagacctccctcttcctcccagattcctccctaggcctgccagaggtctcacaccaccatggggcattaaaaggataaaatctcaggacagagatacagggtgctggcacatgatcccaggcagcccctgcctcgggagaatcccgggttcagagcaaggatgagtcaccatggcctgtccctccaagaccttccccaacatccttgcagggcaattaactgtctactaaagccctcagagcctcatgaccaaaaaatagctcagtgcctaaagttaatggtcagagctaagtctcatttaaggcctctgggggagattttgtttaggaagaaaagaaaaaccaagaacagggtacatggatttattctatccccctatgggatggcccagagagctctaagccaagggtctacctcacagggaacaaagaccttccaaggctcccagccagccctgtccctcacagcccctccgcaaggtcagtcactcacccgcttctgggccacactgccttgctcattgttcccaactgggaaaggtcatgggcctggcgtgggggagaggcctaagcacctgagggcagccacgcatctcaggaggcaggccggccaagcagggaccctggagcagaacccccgtacagtcatgcgcctgaggacccctgtgcccccttactgcacgggggctgactctacctctcccgcagtctcatccccgggcgctgagtaagatggtgcagcaggcagggggccattctagcctggagcccccacatcacagccagccacagaaatgtctgccatacaaataacagagccacactgccctcctggccagcttctgcatccctgttctcgtggagaacgtggcaagctccagtccagtgccctctggtctcccctcagcccttccagctcgcctgtgcctgccagccctcacttgaatccccttccacacccccaggcctgcacaggcctcctgggccggattccccactgggtctgtcgtccccagttcctccagctgccaatcagcagaccaacaaggggcaggtctggggagacaagcatctcagccgaacacaacagtcaccctgggacagtctttcccactacaaaggaatgccgagtccaacctgcttgggatgcagctggcatggtggtacaccagcacctttctgagttaaacattggtgaggacacccatccagggtggcttcagccaggccggccagtcctgtgcacaaaccaccttctcctcaccccaggccccgccgggtgctcctaagcctgctgtttccagatgccaatgccagtcaatgcctgtatatttacccagagaaaagagagcccacggacccatccaaaagtcaccagaggcctgatgtgggagtatgaaggagagatcaaggttgtaattcaaaagaaaatgagattttctcatttttattctgctcctgctggcgatggcgctggcccgggaggcctgaggaagcgagctggggagagggaagcctggcacaggtggtggcaaagggtcccctggctgccctttctggtctggggtcaggtcattcccccacccgtataagcacttggaaggtggtcctgaagtaagaaaccaggccactgcaggtcttcaaagccccaagcagcaggaatacccaaaaaagcccccaaaagtactggttctactagatggagggaagaggccaagctaggagcagccttgggcaaggctgacaaaaaggatggcctgagctcctacagcttccccaagttcctccggggtctccgagcaccatggatgtgaaccaactgcttcacctcatatgtgggtaaactgaggcctggggagactggtcagagactgaggcagaaagaaaataatcaggaggaagaagtccaggaagcagatgttttcatgaaaacatcgacccaaccctaaagccctcatataaacaaaaacagcttcaggaaagaggcccaagcagtgtcaacagagtaagccctgaggagagcaggcaggggtgagcacagagccacggcccagatcaacagagtgagccctgaggacagcaggcagcggggagcacacagccacggccgggatcaacagagtgagccctgaggacagcaggcaggggggagcacacagccacggcccagatccgccagacaacagacacagccaggacggctgggcgcccagggtaaccagcacccgcagaacgctgttggattttactcgactctatgcctttgtgttctgtgtggagcttcccaaccacgaacgtgcattcagttgtggagcttcccgaccacgaacgtgcattcggttgtggagcctcccgaccacgaacgtgcattcagttgatctatttttattttttaaaggcttcaggcaggagcctcaccaactctcctacctggattcttcatctttcctgagtcatggaccactttgggctctgattagagctgcggtccctattccaggaaaaatgcaggactgcacagtcattttgggggttcaggggtcccagttaaggagtctgtagatgcactggctgatgggttgcagaggccactgcccatgtgaccactgcagagaggaggacaggctgctgagaggaagcaggggctgctatggggccatgggcggccctgagctggcccaggtatctgccttctgtcatgatccccaaaataaagcaacagccaggagaatcccgccactgcctacacccctgcctgcacccaggggttccgagagcccaagtgaccccctccaccgcagccacgcccacggcgcatttgctgcaggcaggagggcagaccccggggatggctgctctccctctgcctccttcctgctcagaggttgggttgcaccaaacaagaggtcttttcatccagggtttcgcacaacatttcagcaccacacacttcacagcagatcatgttgcccacaccagaccagccctcatgggggacaagcttttaactcggtggagagggattagagtctctgcagatcagagcagccctgggctggggacgccagcaaaagggtggggagcatcccaaggcctcctgaccactcctggggtcctccaaactcctagtcttggggactaccctccagggtgggggcaccagcaggagggcaggcagcatcccgagggcctcctgaccatactccctgcgctgttccgtccaacctgtcagcaggaggaatgtgacagggcagagctggagcaggcagaggcattggtggcaggctcaccagaaaccctcagctgatggggacagctcagcaaaaaaggagcggcaggagaagactgggaggcctgatgggttgtcgggggtaccgggggcctccagggccattgacagcagagacccccttgcctgccacagctccccctaccatcaacactgccattgcatttccagaataaggcagtttggaaaggtctcctttcttcctggtggtctagtggcttaaaaaaagaaaaaaagaaaccagaaggggctttcacgtgaccttcccaaccaacaaggtaggggaagcctctgtttatggaggaagcaagtgtcccagccaagtcctagcaggggacaggttgggagctgggctggggtcagtctgacccaggtccagtctcccggtgcactctgctgctgtaatcacactgatgccaccctgatgccccccaacccccaaccaacacaccagaggctcgatgagtcatgacaggaaagcaccacaaggctgcagtgagcaggggccaagcccagagtcagagcctcagctgcagtgctaatggccttatccgccagggacggccagagtaatggccggcagctggacacggcggctcatttaaccccaagaggcacctgcctgccacagccgctgccaagggaagacggcagcacagaggacaggaggggaggatgctcaaagccctagtgacaaggccagggcagtctgcagcctccctgggagggagggggtgcctcgctggccgatgtccaatctgtccccaccccaccgtttaaaagccacgttctttgttttctgatcctgaagcctttgcggcctcatttcgagaacaaggtgctggcggctgggaaccagttggctgggttctgccggggagacccctggagctgtgcagccctctctgggcttaggtttcctgccaagacacgtggacccccacatgcgcccgctcaaggctaccagcctcttctgtgtgggcaggccttgcacctacagccgcaggacatcctccaagagcctggcctggggctgcggaggctgccacggctcccacggctcccacggatgctgagtgcgcgagggctgcaggtcccacatcctgtagtccagccagctgcaaaggctgccctgcacctcagaggaagggcaggatttcaatctgcgcaggaggcaggacgggggggccacctgagggcctgcaatgtgccttctgcacagcaagtggtcctggggccacaactccagggccagggtggtaaagcgctgcagccggtggggagggtggggaggtggcaggaagccccgactccatactcaggtgtcaggtttcttggtttcttttctttttttttttttttttggaaatggagtctcactctgtcacccaggctggagtgcagtggcatgacctccgctcacggcaacctccacctcccaagttcaagagattctcctgcctcagcctcccgagtaactgggattacaggcatgtaccaccatgcccagctaattttgtatttttagtagagatgaggtttcaccatgttggccaggctggtctcgaactcctgacctcaggtgatcagcttgcctcagcctcccaaagtgctggaatgacaggcgcgagccaccacacccagccagctttcaggtttctttccgtggacaagtaggagtcacaaagcccaaggaagaatcgtctagaccagggcttcccagcggaattccctttatgatggaattttccccatctcgctgtcagcacggtactagcccatgcgaaggcagggtggtcggtacagctgcatgtcatttaattgtaatgaaagtgaattgaagcagctacatatggctagtggacaccactcggggttagagccaggaaaccttgactctgaggggtcgtgggttaggcaggggagcaggagtgcaggggagagaggaagggacccaaacccagaagacacaaggtgaatagcatagtcaccagcagcaatctggacacctgagcctcaaggccaggagcaagaggtagggagagactgctcagcccagcccagggcgatgttttccctctgggcaggaggggctggagagagtgctggaagttgctcaaagaggtcctaggtgaccagcacaccaccccattctggaagacaatcccagggggaaatcagatgccaccaggaagttgagatgagaagaggctgctggacagagccagagccaccattctcagggtttgggattgcccagggccaaggagcaaacatggggaaggaggtggcctcagcctctagggtttatcctctggcaaagggaggaaggccaaggggcagagcagtagacaggaggggctctgtgttgctttggaccaggaaacgtgagcctgtttgtggggaaggagccagaggacagacccaaaaggaacaagagaaaggagacaatggcggaagcggagggaggtcccccaggaggggctgggcaaaggcgagggggagaagaggggagccttcccctgccagccaggacagaaggtgccgaaagagggagaaactagcttcttaattttctggagaaagggtggctgggtggggggagcgtcccattgttccaccagccgctgagggatattaagcagccgggaaacagagccttggcatgggcagtgtggccggaacccgccacaaagggccactcccagagcgggctcattagggagccgggccggtgccgtgcgcggtgacaggcgggcgcattcagggccccacacaatcgggcccttgtggcgggcgggggagcaccgcgctcaaaggagcctctgattcctagacaagagcgggcctccttcttgccttacaacctgggagccaacggaaagacagatttgggaagacaaagagatgcttcccctgacagtggatggtctatttttggaaatgggtcgactcttctccatagctgccgtttcggtgccaccggccctgcctgcctctgtccccttcaaaacagcctagaaaggcctctgcctcacctgtccagccctgcgaaagtggggtggcggaggcagccacctccatggggatgcctggcagctgattcgagctcctggggcagggaggtaggggtgcaagccagggtgcatccagggcccaaaatggcattccacagcctcgccaaagccatctctccggcgtctgtgcagcacaggtcagcgagggggcaacacaggcagggccgtttactcctcactgctaacgtgaactgacaccagtctcccaaccctggccagccaggctctgtggtgcccagtgtgggcgcatcctcgcccctagctggcctgctggaagggcccatggctgttctccgggatcctggctctggccacccagcagaacctccagagccttcacagcctccaatgacaccaggaccaactgcacccatctctggggctgggcacgggcactggtattttttaaagttttctaagtgatagctaatatacagccacaattaggaaccactggtgaaagccaaaaggtatatattttagtaattattcaggggaaatggggaaggtggggttgtgtaaatcaccaccctcttggggaggtttgattttgctgggggtgggggcggggggcggggagtaacttatttaactcggtgccaagtgtacaaatgagaaaagaaggacaggtgggcaaagtgggtcaaccactatctggcacctggtcagtccttccgggactgttcactcctccctccaacactgactatgcattgcaacaacattctggactgggagagagacaggacagcaagcagaggaacctcgagtccaggaacatgcagccttgtccccagcaaacctgcaccaggaattgaagctcagtgttctcctcttgcactaaaccccttactgagtcctttaagcagaggcaatcagataggggaggcaggtacttccactggggccctgcaggaggggaggctggtctgggccagggtctcagcctcaaacagcgtttagacaggtcaccatctctaggccccacagtgggacccatgtggtcacaggtagcctcaccatccccacacctgccccaaggcaaggaccaaccacgaggcaggtgataaaacccaggctgtagggcataggaagagaattcccaggaatataaaagagctggctcataggaccactgagtgaccgataggaggcaggatgggcaggggaggccaccccttccttgtggctctgagtcaaagggccagaagagatgagggtccctgggactctcagctcagcccatccaagcttcctattttacagatgggaaaatgagggcccagggagaggcacagacttacacatggttgggtctcaagtgggctgaagccactggttctgtctggatcgtccaatccacagaacactagtaatcttccaagacccccaggcagggagcatgtcagctgacaaggccactcaggcccagcaggtgatgtgtctgcatatttatcaggtggggagcaggggaaagatggggataagctgtaaaaagtttccagtttctaataggacttctaacaggtaactctgggtcctcttggaaagtccatcagaaaaggttagagctagaactgcccacaccccgaaggaaagcccaacctagggacttcagggacagtagaagaggcttcaaagaccccaccggccctggccttgctcactgccccagtgcttgtcctgggtccccactcatccatcaccccagctgaacccaaggtgcaggcaaatgcccaccgcatgactttgctcggctcttctttttgttttggtttcgtttggttttggttttggtttgttttgttttgagatgagtcttgctctgtggcccaggctggagtgcagtggcgcgatggctcactgcaacctctgcctcctgggttcaagagattctcctgcctaccaaatagctggcattacaggcgcgtgccaccacacctggttaatttttgtatttttagtagagatggggtttcactatgttggctaggctggtcttgaactcctgacctcaggtgatccgcccagctcagctgttctttctgcgaagcctggtctctcttcttacctgctctcttctgcttttactaactccatcttcaaggcccatctcagttcccaattcggccacccctcctctgagctcccagcacacctgaagaggttaagagcccaacctgggcatttccttgagggaaaggggcatgatgaataatcacacccacagggcaagggaaccgggacataccggctggcacaggctccgggttcaactggacgggagtccctgacctggcccagccccaccctgcccctgctgtaacttgcctcaccatcctgggcctgttccttagatgaaacagggaccccaatggggaccagcaactgttgtgggaggcgagtgagagaaaacccagttgctgtcagcacagtgccaggcacacgtttgttccatccaaaagactttcagaacctgccactctgtgccaaggctgggagtcaagaggaccagagtcccaggctcataaactcccagatgaagagacagtaatgacagagggccccaggtgggcagggagggctccagcacccatgtggctggccctggggtgggcccctgtctttctcaagtctcttagtgccttaggactctgtgaagtttgctcaggggtttccggctctcccgggcctggcatttgttccactctcagataccatcagccgcagacacagtctactcaagggcttttccaggggcagagaggggaagacctgccagcaaatgtccacatgggttctaagacacgccccatattacaactgggaagggaaaatgcccagctttgaactgaggaaatggcagaatgtctctgccgttgaggaatcaggaagaaggaaagggaatcagaccctcgcttcctccccagggccatctactgtagttaaacatgctccacgcctctgtttgaacagtacacataaggcaaacccaagaacacttacaggcagtcaatacaatcctgatctttctgctctgctcccctcaagagctggaggtcagcggtgacctgctgaagaacaggcacccatccccggctgacccggctccaggcctgcccagaaccctctgcctgtgaggacaggggatgtatgagtgtccaatcctgggtgcttgcctaggggagggggaccatttctgacatgttatgatcaaagaagcatcaagtccctttagcagacaagtttgttcctctatccccaagcctttggggatgccaatagagtctcttgttgttatgtagcagggagatgagaattctgaaccccagagtggtccctgcctagatcccagacgctgatcccaaccaccctagatgtagggatgggagtagcggggagcagcatcagcgctggggatggagggcacagcagccacctgggagcggcagcatctcccacaggcgctgtcctgcctgagccccacccaagagctcaggacgcctgccctagaggacagaggtcatgagaaggcagatagcagctgagagcaggactttggagcagactcaccaggtctggaacctacagaaggctctctcctgtggccactctcctggccagaacctcctcccgatggaagccctcagcttccacccactgctcccccagcccagcccacaccacagtggtcaccagagtgatgctccagaaccaccaccccccaagccagactccaagaatcactgctcaggaggcactcagacctcagaggcagtaaatgctcagtgaagtccgcagacgcttcccttcctcctgaagagcaaattaccacctgtgaggtcaagtcccgcttcccacctggctctgggttcaaccagattggattgaacacacacattcaaagctgggcattttcccttcccagttgtaatgtggggcgtgtcttagaacccacatctcaaccagattcccagagctgtctggggtgtccacaagccccatcctcagtggattcaggaatgccccttctcagtgtccacgcaacctcccctgacacagcgctccccagccctggaggcaacacaggccacctgggccactcttgcttgtgggcactgaagtctgaaaagctgggactttggggtctgccctgtggggctgcccacagcactaacccccctaagagttatctccccacacacatcctgggtccaccttgcaggccccggattctcaatgccatgctccagaccccacttccaaaccttagccattcttattcctgcctggaatgctggctccctccattcaactagatgaggactcagctgcctccgaccctacactgggtaccagcgtgtgtcaggggatctcccactcccacccagggaaggcaaatccgcagaggccaggaaataatgaaaggacatggaacccatcctttaaggcccagttctaggatcgagacattattagcctcaggatatagatgaagaaactgaggcttagaggttcagtaagctgccacggccataaagcaggtggcaaagccaagattcacccagggctctctgaccctggaggcagatcactaaccagagggctacatgcccctcggcatgcggggtgccgagcgctgcagcgggagatggggccttcgcacatcaggggctgccacccgccagaggctacacgtatcactcactacacaccctcctccctcaacccaaaggttagtaacattttcccacttggcaaaagagaaaacagaggcccatggaggctcaggaacttgcttaacagacttccaattctctgcgcaaatgaaggcaacaagcatggattggaaaatccccaccggcggaaaacagattaggagcaaccactgatttccttctgtatcacgtgctggtcctgggaactcagaggccaggcctgagcaagaggtctggtggggcgactgctgcggtggcaagccagcctcgtgcagagaagtgagggaaggagaaaccaagagatggggagccacagccatcgtagggaaggtggcccaccctgcaccgccttcccccactcctccatgccaggacacagggagacaggaatgaggccccgggcctggcatcctgggaggaggtgccctgtctctgtggcagaggtcaccgctcccctggaactctctgggcagcaggcacagggccatgggctcagaattctgacacaggagacccaagacgcatcccaggccccccaatcagccccacaggacctagagcaagtcaccgcaccaccactccaagccctgatttccccatctaagatatggagatgctaaggtctccctcctgggaccatttggaagctctgaacagaatggaattgggactgggatgctgtttgtggcaaactgtgaagcactgggcacagtttacccacccctgggtcacctgcctgggagcctctcaaggccagccctcctttctgaggcccagcatcccaaggccattgatggatcccttgggacaggctggggaaggagggggaaaggcttatctaacccaccccattgtcttcactgacctttgttcctgagcttggctgggtttaggaaaagcagccttattagccgagctgctgcacagaaaagacctattcagagttagcgtgctctgtctttttctaaaggcccagaccaccccgttccatcctccctcttaaaccaacaaaaacacaagcaggagaacaaacctgtctcattttgagaagctcaaaattttaatccgaactttaaaaagtaaatggggctcatgcacaggcttgctagaatcctagttcctccaggttggctaaaggggagtggaccgtggaggagcaggttatcaggggagggaaggaaatgcctggcaatgggcaggaggggggcatggtgcctgtcgtggggcacaggagacaggcggaggggcagctggaaaaagaactgaaaattcttttgtttgaaaatcctatcagttcatgaaggagaacctgactttctggtgttggggtttacctgtctcagtgtgccacactggactagagcaacgcacagcccagtcccaagtccagtcagcccagaccagacctctaccaaaggcagccaaggccaggtgcagtggctcacgtctgtaatcccaacactttgggaggccaaggcaggaggactgcttgaacccaggtgttcgagaccagcctgggcaacatagtgagatccagtctctacaaaaaattcaaaaattatctgggcatggtagcacacatcccaggaggccgaggcaagaggattacttgagcccaggaggttgaggttgccgcgagccatgatggtgccattgcactctagcctgggtgaccagagagaccctgtctctaaataaataataaataaataaataagcagccaaggagaaaagcctatttgcatgtacatacacaatacacaggcccaccaggccagcctcagccagggctgccttgcatacagatgggccacctcccacctcagccactagagtctgcccagggcacccagcagggctgcaactgccaccagctccccagaaaggacagcagggccactgtcctcactagctcatcagcaagtgctgccacacaagaggctcagatgcaaacattcaggtgagctgtctaagcagcaagcacttttgaagaggaaactgaggtctgttgggagagccccaaggaccctaacaacaggagaaacctactgtgtgtagatcctgacctcactcaaccttgtgtgaataatggggcactctgggttctgtccatcttacagaagaggagcacagagaggcttggccagttaataacttgcccagtatacatggaggagctgagattcaaactcaagtcaccctgagcctctgggtaacggggttatcagccatctgctcaatggtcactgataaggaagtgacacttcccagcatgggagaaagagggcaaacctgggtcaggaatcaagaatagggagtcaccagtgtcccctgattaacagtaacagcaaacatgacaacagaccaagggcacaacagattcagacccaaggcctgaacacgagatgatcatggcagcaaacccacccaggacaggtacttccaatgtcagccaccttcccagacaaggctaggaacccctctaagcctccacttgcttgtctgtcaaatggggataatactgcttccccagggttcctgtgagaagaagcaaagaccaaacacataaggcgcaagcctggtgtctgaccccactttagacaccacccagacagagactcattatctccctcagctcaggcccaatctttgctcaatttaaagttacaagtcccagaatagaaaagcccagtttcaccaggtgaggtggctcatggctctaatcacagctacttgggaggctgagctgggaggatcacttaagcctgggaggttgaggctgtagtgagccatgagtgttccattgcactctagcctgggtgacagagtgacaccctgtctcgaaaaaagggaaaaaagaaagaaagaacagctcagtttctaagagaagggcctttcctggtttccaagccttccatttacattagtgggaccacatcccaaggccacacatggctttaagagacaaaactaaataataataattccatctgtaaccgaaatttgtaataataatgctgaattttcatttcaccccaaagcaaggtttgctgccacaacatttgcagcagtcctgtgctaagtgggcttgggggaggatgggttctgtgggaaaccctatacttcaacctcccactgacccccagtggggtggaaaactcagtgtagcctagtcctccactcctgtattattcactgtcgcagctgacatgctgagccagactggggccgcatctccttgcccaaaactcgacagagcctttcctgcaagtatgctctaaacactccagccctccagtgtcctgcagagaggcactcttgccaagtgtcattgatgacgcagctgaaaaccagaaacatttcactttccagccacgagactgcagcaatctgctctttggactgcacttagggaaaccgaggcccagataactgacccctcaaaagcccccaggacggcaaaatcaaaggggctgaggtgctctgaacagccccagcaaattaaaccacctaactttgcgctactcccactgccctgaagcagcctgtggtgggaggtgggggtggatacagtgttacaaagagaaacctgagttgtagccatagattgctaatcagtaacaaaatatccctctaaacccagtcctgccttgaacccacaggctcaggatggtaaataaaggaaaaacatgctgcactgcccctgccccacctccatgggtatgtctcccaccccagcccccaccccaacacgtctgcagaggccacttggccaccaaactaaggagaaaacgtccctccccagctcaggctgaggggttctggggagggcagttattgcaggcttagacacactttctctgaattaggaaaggctttaaagggaaccagaaagagctgttcattctccaccttcaggcaaaaagttcaggcagttgcaactaccagcagaactggaagccaagctaccaaaaaacgtggaagaacagggaggccccggatccaccagcgaggaggagaaagctggcagggagcagaagggctgagcagggggctgggagagggagcaggctgcaagctcccacagccccaagctggggccaccctctgcactgggcgcagcagtaacatgggcgtagaagacagaagctgacagaggccaaagttcctcccacccacaccctggtcacggatgaccacggcacttcctgtaaggcgatcaacagtttataaatcccttcagaaggtttatctccacctcaaacccacgaggcagaggtcatcatctccatttcacagacaaagaaactgaggcacacagaggagaaaagctagaatccgttccaaatacatctccctcgggaaagtcttagagtctcggctgagaaaggtcccaggactagaagggcggaatttatggcaaacaagaaaggctctgagccccaggcctctccccaactgcctctgggtctcaagcggctgcctgtgcaccttcccaatccccacaccccactgcagaactccagccaccgcacacacgtggacgctgcttggtttggaggacacctgttgctgcaagaggggaaattcacttgcgctcaaggggccttgtatcctttgctgtttagaacttcccgctactaggcaaggatttccaaggctgggatgaggcgcccaccgccagcccagcagtgacagaccctaattttggcaactacacccgctagaaacttttctgggaccggaccggcagcaggttctgagctggacaaaaagacgctccaccactgaaccggcccaccaccgcccaaagccccactttgggtgagtgcgggatcccctggcccaggatccatgacagctggaggagtctggagtggcggccgcatgagtgggacagccagggaccacctcctctcgccgcagcctgggaaaagggctgcagccagggagacccgcgctgcccggcccgtgtagtccttaccgtgcaggccgttggggatgctgcggtggtgcggcggcgccgacaagtcgtccagggaccgacgtgtggctcctgccttgccgtcgggggccttgtgcggcccggggggcagcagcgggggtgggacgtggtggtggtggtcggggctgccgccgctgcccgcgctggacgtactgctgccgtcgcccacgtcgcgggcccccgcgccgggcgcgccacccgacagcggcccgctcaggctggcctggctgtcgatggagctgcgggagccggcgccgcccccgccgccgccgccaccgcttgcggcccccgtcgccgccagtgccgcgcgctcctcgtccagcagcagcaccagctccttgagctccaggttctcgcgcagcagggcctcctggcgcgcctcgagctcgcgcagcttctgctgcgagcgggccacctcgtgccacacggcgccggccgcgtggcgcccgaagcgctgccactcgcgcgccagcttgcgccccttctgccggtcgtcgtcgaggaagcagcagagctcgcgcagctcctggttgtcgtcctgcagccgctggttcacgtccttgaggccgcggatctccagcaggtgctgctgcagccgccggttcacgtcgcgcatcaggccgccgtgctccagcatgaggcccaccttctcgccctcggcgcgccgcagccgccgcgccagctcctccttgctccagcgcagcagctcctcgtccggcacctggctcagctcctccgacgccgccgccgccgtcgccgcgggcttagccatggcggggccgtcaccgcggcatcgccctcgccctcgcccggccggcgcttccccgcgccggggctccgctgggccggtccgcgcgcgggcggggggcggccgggggcgcgtgcggcccgccccgcgccgcctggcgcgtcctctcgccgcgcccgccggggccgcccgggagcccgcgcgcctcggggttgacgagcggaggcggctgctgcgtcggcggccgcggtgccgggcgctctcagggttctggagaagcaggcggaggcccgcccccggcccagctcccggagcccccgccgccccgcccaccccgggcggagagtgggcgggtctccgaggcccggccccgcccccgagggcgactggggagcagaggcgcggcccccgccgtccccctgcgcggtgcgcccgcccgtccagtgccctctcagaggcgcgttccggccgcggtcccgccctcccggccgggcgattgggccgctccgggggtgtgcgggaggggcggggcgcgcgcgggggaagctgcggcggtggtacggtccatccgcggggtttccgacccccgcccgcggccggctcccggcggttcaagtttctgcgcccggaggacgcggccttagccaatcccagggctacagggcgcttttaaaatgcaggtacggctgcggggagggggacggtgggaaaggtagggccgggcttcccttaaaggcgacgcgcgaaaatagcagtcgagccccctccccggcccgcgtccccggtcctcttccctctccccagataaacaaatacccacgatccgggcgacggcgccccttctccctcccgggggcaccagagttcagggcagtcggagacacagcgaacaataggactgtgacatgggggtcgctcttccccgcagcagggcggctctttgtccccttccctgcccccaggctcctccgcccccgtccccacccgggtcccctgccggagcacgcggcggggctgcgtctccactcctagcccagggctgagctaaacgctggcgtccgcgcccctgcagggccagggccttgccagccgcgtcccgcagcgcggtcagtactctctgccccgatggggcgagagctccgggaacctgccccctgcccggagcggcgctcggagccccgctccacctccgctcactcgaccgctaaatccctgggattcgggagataatctgcaattcgcggggtggaaaccactgggaagggtgggaaggtctcccactggggcctgaacgccggggtccgggggcgccgagccggccacagaactccccaccggcggcctcgcgggacccccgggcttcccactgcctgtaagtctgtctcgttatcctccggtccccaaagcgcatttacggcgcgtctaccgccagcaggcggggcggggcggggcgggggggggtccctcccccggaacctgcaacgagatcaaatccgcgcacgcgacagtgagcggcccacggcctggagcgcgcgcccgcgcagcagctgatgccccatttacagttgctaagccgttcattcagctgtgtactcagcgcctactcgccgcggggcctgctccagccccgggggattctgcagggcaccgaactgccctctgcgggggacttggcgtcctgggagcaggatggggagaagatagacgagctagatcaggatgagacttgtcttaagtgctgtgcggggcattaagtcgagctgctgtcatagaaagcataatcagttgctttagatccagcggtcagggaggtggggaggcacatctaagctgaagtctgattggcaaggtacaaagataaggggaagggcattccaggcagcaggaacagccagtgccaaggccctagggctggcctgttacagacctgttccaagaaggccagtggggctggg

SEQ ID NO: 94 - DNA, 149521 bp, Homo sapiens
  source 1..149521: mol_type = genomic DNA
aaagaagcgtgcagcagaggctaagggtgccaagaagtgcctggccagctgtcaagtattgcaaaggccacacaggatgaagactgcgggtggccaccgctcagtctggctcaaaacagcatggatggcagtttctgtggagtggccagatacaaggacagattgcagagcctcggggagaacgggcaaggaggtgagaggagagagccaaaaaataggcttggtgagaaggaaggagacactgaggcagcagctggacagaaaaacatcagaagaaccttggtcaggcatggccattttcatgcctcctccttccctctcttcctcctctccaccatgcatccgatttcagtatcttcggcccctaaggtccaaattccagatccagcatttactggttgagtagccttgggaaaatcataaggagccccttcaggctgagctcctgtcacgacatgagatgaacgccatagcaaaatggggttcttcaattatttttgagatggggtcttgctgtgtcgcccaggctggagtgcagaggcacaagtcctggttcactgaagcctcgactgctggggctcaagtgatcctcccgcctcagcctccatagtggctgggactacaggtgcaaaccaccataccccgctattttattttttgtttgagacagggcctcactctgtctcccaggctagagtgcagtggcaccatcactgctcactgcagcctcaacatccctgggcttaagggatcctctgtcttcagcctcccgagtagctgggactgcaggtatacaccaccacgcctggctaatttttctatcttttgtagacaatgtcttgctatgttgcccagactggtctccagcccattgcatgccccctgtggtggtggtgacccattagaaaaacaaataaaataggattcaattgatgccaacttaaacacacctgaggaggggtggaaagctgtcaccgtacaggaaatctttgtccttcacatctgtctctggttgcacgtgtaacagcttcccccacctagtggcaaggaaagtggtggattccaactgtggaggaagggtcgccggcatgcagagggaggggtgcagggggaggggtgcagagggaggggcacagagggaggggtggaggggcgcagagggaggggcgcagagggaggggtggaggggcgcagagggaggggcacagagggagcggtgcagagggaggggtgcagagggaggggcgcagagggggggtggaggggcgcaggggggtggaggggcgcaggggggtggaggggcgcaggggtaggggtgcagagggaggggcacagggaggggcgcagagggaggggtggaggggcgcagagggaggggtgcaggggcacagaggaaggggagcagagggaggggtgcataaggaggggcgcagggagccccaagtccccaggggcccacccgatgctaacaatgtgcagtgaggaaagccagaacgcacttcggttccattccattttattacagtcctgtccttgagttccagaatgaatggctatttaatacacaaccccaaacactcctaaaatggatcttgttaacattcaaaagtctcccatttctttctcagtatattaaatcaaaaggaaaaaaaaatcttaaaaaaaaaaaatcaataggtttagttcaccccaggaaaagcacctttacaacaggaaactaaattgtcaggaatctgaccaaagacacaaagcagcagataagattcccgacagaagagagtgactcccactggaacataaatagatccccccaaagtatacatatttcacatgagtgtgtacatatacatgtcatatattaaaaaaaattggtttctatacccaaaaagttattcagaaataaatcaacaccccgagaccggggatgtcgggtgccgcagccaggttacacatcgagcttgcacctcgctctgtgcggatgacccctcggtgcactgtgcacactggcctggagggggctggatgggggcctctttcctgccccccaatccccaggcctggcagatccagtgtttgcagaaaagtgagccagggaaatctaggaaggcaggtgcctgtgtggtccccaaaccccctggtgcagagctcaggagccagctggaggctgggggcaaatggccaaggccaccgccagctgccctgcaggctgccctgggtcctggggtaaagggaagtgcttgggaccccaggaatggaacagcagcactctcactttttaacagcaggcctgactctggggtctgccaggccctggagacctttgtagtatcgccagtctgggcttctcctgggatccagtggccttgggagagggagtgggctttctgacccgccaggcctgagcctcgtaagcctgttgtgtgagtgtgtgtgtgcttaacggagctcaacacattgcaaatgagtgttctactgggacatactggagtagtgtctgctttgggggaagtcagtttgtcattgcatcctaattggtccccatgctgacgtggattatttgttccaaagatatcagctgctggaagcggcagacacagaaaacacgttacacacctggaagcgtaatcctcttggggcttggcacagtgtttccattcacagaacaaacagcagaaatgcgtgggaacccctttcctcattccaaaccctctcctggcaccgcaggcaagcaagagaaaaggccgtgagagtcggaaggcgcgtcagtagttttcaggtttgcgagctcaaccacgagacagtcacacacagccgtactcataccacacggtctgcggatccccgccgggctccggggaggccggactgctctttgagacgctccctcgactgcagtcctccagggcccggccgaggtggggagccaaatcgggagaccgacctgggctcttggccggaagcccctcactgcagccctgccccgggaccccgtctccctctgagaggctgagccctgcccggacaggggtgatggtggccacctcccctgagcgtgggggcgccttgggcttggtcctggcagccggggctgcagcaggtgagaagtgcaggagctgggagttgctgccactgccagcagcagcagcaccagcacctgcagtggcaatggcgggggctgtggcagactgatgcaggggggccagcctctcctcctttgggggagccagggagaagcgcctcgtgtccagcggccggctgcggggacctgggccctgacaggagctgccagcctttcccacaagtggggtccgctcccgggccaggctatgggagctggggggtgcggggctttgcagggtgtggctgcctgtctctctgccccctaaggcctcaggagcccccagcttctgaggggactcctgtttgcaggcctctggcccgctggcccggagaaggtcagctgaggccaggctgaaggcccggctcaaggaggcactgcggctggcaggtgcatgggaagctgggggcaccggagcctgccggggtctgcccagagacaggctctggggaggctgggcctgtctcggggccacgctgggtggggcctcggcctcagtcagtctgaagtttggctttacgtactgcccgggcttcagcggcctcccctccgaggtgggggcggccattttgacggtgggggccacaaagttggtgggcatcttggccccttctttcttggcaggtggtcctggttggcctccgatggctgggggatcgctggcctttcggaagtagtcactcagcaggtcatcccggcaactgggagtgtcctacggagaagagagtgaaggttggaggtgggcatgagggttgggtgggtccttggagccgcctcctgcgcgggacgcccccgagcagcccacgtggctgggaccgcagttcctgcctgccttctccgaggcacatgtgccgcctccaccacacacaccagccctgggcaggatggtgagggtggctaaggcagcatgggaccaccaggaaagaaccccagattccccccaggcaaccccctaactttacagataaggaaacagacccagagagggaaatgacttcctacaaagtgagtaagtttcccagaaacctcgactatagccgactgcttcggtctgtctggtttccaccaagcacagcaggaactagaatgctggcggatatgagcagggccttccttccccggtcaccccgggacatcataaggacttcaccttgcgccaccgagagcaagaggaacaagagcagctcttgaaacgccggaaccttcactgccactcagacctctctctgggcccgagaaagagaagagagaggcagaatggggatgggagggggtgggggacagagaggtacaaatggggtccgcgagggtccagaagggggaatggtggggctgcacagggaaatgaagacaccaggaaggcccagccgccacactgtccctgctaagctgccgcccgggctgtgcttcccctgcccagggagcaggtgtcatttgccaccaccttgggaataggcagagccacagaggcaagggtctatggccccactcaggaactgcagccttctgcaagcctagcttctcctgaggctgacatggatgaagaggaagagaagtgagttcatgggggatgagaggccggcaggtgtcagcctgaaggcgggttggtagctcaggagccatctgcacctgccagcaactcctgtcccacacaaacatctggacatggtgccactggacagagatacatctgctgttttatgctagtttgacgctacacatcttgggtgggcgtccagtaagacccgtgatatcacaggtacctttcatcacctgtggggccatgtgctgttctgggaaccacatgtataattgcaaagaaactcatttaattctcaaaatgacctcgcaaggttgttgaaaggctgtatcaaggtaaagaaacaggtcacggaggtttggcaggccatgcgtccagagaggcagacccagatgaaagcctatggctgcctgactccagagctgctttccactccaccaggctcctccctgcacacctcagagcctttgatacccacccttcctggccacgcagggagccccatcttgtgacatgccctccctgcatcatcgacgcccagagagtgggggcgcggtgggcatacggttgtcatttccctgggatgggaagcccctgtgtacattaggggccttgtgtgtcaggggtaccaggagggaagtcaggtgtgtcaggggtagggggttaaatataccaggcagacagagggggctggctcgctgcatgccagacatcagctttcaacagaagctgctacagccagactgttttggtctcatttaagctaaaaatggaaaggtaacagtacagggcacagggaatggggactgtgaagaccagtctgagctgagcagggaggggccccactccttgctcaggacctgcctgccagatctccaaagggaaaggaaagcatcataaggggcatataacaaaaaaagactgagaaggaaagccttccagctgtgggcccccccaatttctggagtgttcttgttcagtccattagaccagcagttcttttttttttttttggagacagagtctcactgtgttgcccaggctggagtgcagtggcacaatctcggttcactgcaacctgagcctctcgggttcaagagattctcctgcctcaacctcccgagtagctgggatcacaggcacccaccaccatgacccggttcatttttgtatctttagtagagatggggtttcattgtatctttagtagagatggggtttcactatgttggccaggctggtctcgaacgcctgacctcaagtgatccacccaactcagcctcccaaagtgctggaatgacaggcatgagccaccgcttggcctagaccagtggttctttttttttttttttttttttgagacggagtttcgctctgtcgcccaggctggagtgcagtggcgcgatctcgactcactgcaagctccgcctcccgggttcacgccattctcctgcctcagcctcccgtgtagctgggactacaggcgcgcgccaccacgcccggctaatttttgtatttttagtagagacggggtttcaccgtgttagccaggatggtctcgatctcctgacctcgtgatccgcccgtctcggcctcccgaagtgctgggattacaggcgtgagccaccgcgcccggccagaccagtggttcttaaaccatggtgcctacccagccgcaagaccattatctggaatttataaagatgcaaattctcagcgagcccaacctcagacccattgattcagaaactcaggggatgggttctgtggtctggcaaggcccccagacgattcaaacgcacgcctgagtttgagaaccacaacattagaccgctaacttctcgagggcaggccctcctttgtttttctccagctttggcttctccagctccttgcacagagtaagtgcttgggaaagagaaatgtttaaatgaaggaaggccagggccatgttttatatttctctcgtgtcaactgcaaggctgggcacagcacatgcaggcaaagaaaacctgctgatgaactggtttgctttgctttccaagagcaggcaccatgcatactgctaaacataagactgcaggtgctcaataaatatctaccaaacacacactttcttttctgtgtcactgtgccctagtaatgcaggtcacagggtttaccagagagccagacaaagtccaaatgtgtttctttaaggggaatgagatggaaagactgaaaaaggctgaagttttaagaatcctcaaaagggctcaattgcagacagtgaacttcactcactcagtaacccaacagctcacgtgacaaaattcagagcactttaaagacgtatgtgcagcttcaaaaaagctaaacgaagacctacagaggtggcaggaggttgtcaacaggcagtgtttagggtgaggagctgcagagctggggccaaatccagctagccgcctgtttttgtatatcctgtgagaatagttgctacatttttatttttattttattttttcttgagacagagtctcgctctgtcgctcaagatggagtgcagtggtgcaatgtcagcttactgcaacctccgcctcccggtttcaaatgattctcctgcctcagcctcccgagtagttggggttaaaggcacctgccacaaggcccggctaatttttgtattttttgtagagacaagtgtctctacaactctgcttatcttttgtagagacgggtgtattttttgtagagatggtggccaggctggtctcaaactcctggactcaggtgatctgcccaccttggcctcccaaaggctgggattacaggcgtgagccactgcatctggccagttgctacatttttaattggtcaaaaagaaattttgtaaaaacgtatttcacatcatgcgaaaatcatatgaaattcaaatgtcagtgtccataagtaaagctttatcggatgtcagccatgtccatctattgacataggatcaagtgtctgctttctcgaatgtggcagaattgagtagctacaacagagactgtgagacccagaaagcctaaaatcattcctctctggccctttcaaggtccttgaaagtttgccaatccctgctggagaaaatgcagggtaagcgggtactcagagctctgccgtgaaacccagcgtgagatcctagccctgtaagtcaggtgctggccacgcacccttggtgcgggccacaagctctgccagctcacttcccagacccaggggagagcagcctccagggttggggctggcggctggcttgcggtgacttgtcagctagtgctctagtcagcctctcatgtccaagccagtcctgtgcctaggccacgccacccccaccccatcctttctgcagctatgatcttgagccaggaagagacagagagggaagagagacgggccaagtccgtgtccggatcactcacatgggtgggggagctgcggttgctctcctccaggaactcctccaaggtgaccatctcactgctgggggaggccgagcagggccgcactccgacgtagggaggggctgtgcccctcttctgggcaccctcctgtgggagaggcccgttccgaggcaaggggtactcgtggcggccgagggcgttgcgtcccggtgtgctggcttcccggggcaaagtggccaggtccctgctggggatcaggtcttcgctgctgaagctctcagaccggccatggagctgctcggaggagcctgggtgtcagggcaggagacagaggaccctcatcagtcttggcagccctctggtggcttctagaggcttcgtgctgcctttgcccacttcaaactatcagaataaaatcccttgcccgaaaacccagggcttattcccaccaggctgaaagtctggactccttttgaatttcactttggctttaaaaacaaaatactttgagataaaagtggaaagcttctgctgaagtttaagttattactggctgtaaggcactgcccttgtcagcgctcgctcatgcacgtattcaaagcttattcagcacctgctatgtgctaggggctaaatgtacagggaaggttcatgaagaaagaccacattctgtccctaacacaaaccatacatgttccgagaatcaaaatcctccacatttgttctgtggccacagtagaatggaactagtgttactctccccattcttcagatgaagtaaatgagactcgggacctgtgacatgcctgcattctcagtgctgctcgggggagaagggagctgaaccccaacccattctaactcccagcctgtgcctgaaactgtactgtgtggcctctgaatgcgtcagaatgcatttgaaacccctagtcatgtattttaaaaattataataatatgaccccagagccaaaccaccaaatacactttttttttttttttttttttttttttctgagatagggtctcacttctgtttttcaggctggaatgcagtagcatgatcacagcccactatagccttgacctcccaggcttgagcgagcctcccacctcagcctcctgagtagctgggaccacaggcatgcgccaccacgcctagctaattttttatttttttagagatggggtttcgccatgtttcccaggctggtttctaactcctgggctcaagcgatccacctgcttggccctcccaaagtgctgattataggcatgagccactgtgcctggcccaaatcaatttttaaaagtacacagaagcacaagacttaccttttaggttaagaggtgagctgttgctggatgtgtttctactgctctctaagctacttggccgcgacactgaaaggaaatggcagtgttaaaattaaaaagccaatgaccaggtatatcccagatgagccatctaagaaaaacgatgcagcaaaacaatcccatgccaaagctaagcccaacgccctcaggaaggaggagctctgggactccctctgcgctccagtgaggaagcctcacttcaccaacggagtgctgggcacagcacaagcagccatcaacagatgatactctgcttatctacatttatgaggcctggggctgcagcttcaaacaacttcacaaaggaaatctcacacagaacgccagtatagagggcagacaaaaaaaaggctgtgctgggtgaaccagaggttgaggttgcggggggccctcctctattactgcacagagctttctggaacacatgtggacagccgaggccgaggccacgggaagagagatgaggaccgttcagggccatgtgtgcgcacatgtaagggcacgcacctgaaggtgtcacgtcaggggacccacagggagcaggtgccaggggcctgggaaggaagggggcactcccttctcctggacatttgctattcttcagcttctttgtgtcatttgcctcaaatttacatctgccccaaaggaaaaaaatcaaggtttatggtgctgagggcacctgcccacctggccacaacaggtgcttgcctgagtgtggctctgccatgccaccccactgcagactttcaggaaggctggcaccattccctacagagggcaggccatcccttccagggcctgcacacctctcctgggccactcctccagcggccctatctcgagagcaaacatgtctacgctgctgtgctatgaacccccgtggcagggatggcatttcagttgtccctgccacccccagcacccagcaggtgctgagctgagccacctcaggagcctgcagaagagacacctggggttcctctgctcactgtgccaccaaggcaagttcactcaggtttcctgggtccacagggcacctggttccaagggctgaggtgctctgcaaacagcagatgtccagaaaacacctgctagcaaatatgtttgaaactgagccaaaaacatacttggtgatagcgaatagcctaaaaacagaatcggtcccctccctgagcagtgaaaatgtgaaataaacaaatgcacatctctcttaaaaaaataagtaaatttcagtataaggaaaccgtgatagcgatcaacggcccaaaagcaccattgtttattcaagtactgcaatgcaaatccttttcccttctttttcctaagagaagctagaggaaacagaacatttatgaaaaaagttcctatggttagctgactgatcgcaaatctggctgctcagggagatgcacccagcacacgaggcagatttcttctgttggattagcctccactcagtgtaaagatgtaagactcccattcattcaattgtttcattacagttctttactcaagtagaagactgtaagaatgtcatcaagctttttagaccgtggataggggtaggaggtgatgccagctcctacacttaccgagcctttcacaagtaaactgaaatcgatgtaaacttcaaggggtctttttaggattattttctcacccttgtagggttgcttttcaaaaattaaaccaaagcagcttttgatttttgagaaggcaggtactgtttactgtctcccttctgcagaaatttataacatgctcgaatccaatgacaagtgcttctaacaatttccaagactaaatacgcctcagagctactatgggcaactgcagccaagtgaggacagcaagggaccttcttgaaatgaacgctccccacctgggccaccggaacttcctggccagcctggaagggtgcttgaaggcatgaagaggagaggtcggtgcttccagaactgtgatgcttgggaggtagcgaattccccaccactggaggtatgtaagtagaagctacacgctcagccccctggggaggggaaggaagaatgggtcccccatttccaccttcatttggtgttggactcccgtacaggactcagcttaaaggaaaggtaccgtggataaaaaccagtctggaaacccaggctggaggacacagcaccctccctactcaccgtactgcctgtggttggggacctcaaactccagggatggctcacagaggttgtcatctgagttatagcctaaggtgaaaataaggctagtgagtcatggttacggaacatgcctcatccacagggaaccccgccacctcgcctggcacccggatcccagtagctccagctcttggggatgagggaatggcatgcagatgctgcctttgggacctgcctctcctacccctccaccgtttctcctgctgggacaaccctgacactcccgattcccatcccctttaaatcacacttccacctctgctgtggctggaacgtgtggaccaaaggcgtgttctggcctaaggataatataaaaagagctgaatattgagtatcctggggagtcctttccagtctcagaggccagccctgagagcaattcgctttcagcagtcaagctgtcttcaggtggtaggaggaagaaggaagaaaaagaggcaaaatcagaatctactccttgaggggagaggctgaattcctggggaataacccttgcactaacagctcctgaccagaaacagacctggaatccattggccatcaagcatttggcctttccctgaggactggaaaatgccccacgcctcaaaatcctgctagtttctacctgagagcagaccctgggtcccctccaaaatgacaacagggtctccattttggagatggtgacatgcccacctgcaacagatatctggagtgggagggtcccttgaggtcaggaccctatctctgttgctctgttgttcagactcaaggttctacatgcccatggcttcaagagtcaggtgagtgggtttatttatgcaaattaaccccttcttgctctctcagacttccaacaccccaaaggcaatcactttcaactccttcagctgtttctttggatattttcctatctcttaaattataaggggaatgcccttttccgttttaagcattatctcttcctttctctttgcatattttaaatttccaaatgcttctcccttccctgttgcttttttatagcatcctgttcttgtttcttgggtgcaatcatttctcttgtctctgatttgagtgtcacccggcaagatctgactgagccattctgctgggactctctcaggctaatgagattactcaaagaatattttaatctcatgcctaaagatgtgaactcctggcaccctggagacagggagttcctaaatccttcactgaacccatttgttttcaatacaggacacctgcctcaactgtgtcagtgaacttccagttcagagacgctatcctttcttggccaggtgtagtggctcaacacctgtaattccagcactttagggggccaaggcaagagcattgcttgaggccaggaggttgagaccagcctgggcaacatgatgagaccacatatctacaaaaactttaaaatacacatacacacactaatttaaaatatataatttatcttctctcgagaaaaaaaccccaaacttttaccaaggtagggcaatggcagttgcctggttttagcccaaactctggttctcagcccaccttcacctcccttctggagctatttggtgccttcatttcctgaatgccggtggtggcagtgggttctgaggccccattgcagttgggcctctgaagggcttcctgcccaaagtccttggctggtaagcacagctgcatctgtgccaccaaagcctgtcagcagcctcacccctctactcaccacctctcagactgagagggagagcaacctctctgatttccgagagcctggggtcttcaggaaggacactaggcccgacgctcatggctctggaagggcctgtgactcacctttggtgcggcctgggtgccgggcgatgggggtggagttggaaggggctgtagtggtggctgaagttgagcaagtccgggagcccagctccgagggccaggacctcatggccagatcggtggaggcatctgtgcggtcaaggctgcctctgtgtggggagcctcgctttggttttagatccccagggcctgaggcagaagaggacattgagaaatgaggctgccaagtcctgtacccaggctgggaaaccacaccatggcctagaagcagggcagcagggcatgaggaccacagagacaaaagcggggctgccacagctctcgggctgcaacttaaatggggcctggcggggcaggtgggggcaagagggcttggcttcaggtggtgtcagaggccccatgaggatggctctggctttaatgctggggtcatactgccagccctgagaggctgggaggagacaaagggagcccctgaggggataaactgttggtaaaagtcacacatattcactctaggacacatctcctgtgtaacactgtccggaactccaatccctgacttccaaggatccaagcctgtagctgaggatccgaaggtcctgctaacctgactcactaaggacttcaaatagaagtttattgctaacctcacaatattctgttttttcaaaaagggaagccttaatctctgcatggtgagacgaactgcaagaaaatttttaccttgtgtcttgtgcttttctgaaatctctaacttttctaccatgaacataaactctggtcaaaattaaataaaaacatataaaatcataaaagaaaaacagcccataaaaccaagtaccccacaggaaagaggacaggctctcccaacacaagataaaaatgaacatggctggcattcctaagagctgacaaagcactttgcagagcgtcccactccgtgtgcagagccaggactcactgttgcagttcggcttctccacccatcaagccgtctgccctcccagccactcaaagtctgggctcactgtgcagttttaagtgcccagagctgatgatttgaaatcaaggggaaatttggattttgaaagataaccttgatgagaagcaagattcaagtctgcctgaatcgggacaggtggaatgaatcgggacaggtcatcctacaggtgaagctaaaatgaggatccacaggggaggcagagatgagtgaacagttagcatgagcagcgaacagagaaagcacaattccaacagcatgcgcggaaggcaggtctggaggacccggcaccacggcagcccagggttcccagagcgaggctcatgagatgaagtcagtggcacattaaccgactctcatattttagtaattatgtgtttattcttatgattaccttgtttttatgatgatatgtgtgttttccacttacaggactgatactaatctttccttttaatacatttaactacaaactgtgaatcaatgtaagggaaaacatgcaggtaatcatatttttgtaggtaatcatagacggtatcaggatatgacaaaaataacggaggtggtacagggatggctagagacaggaaatgctccataggtaatggcctagctggccggctggcattttcccttgctcgaggcatgatttgtgtgctgatgttctttctgtctcctgctgttttaacttcagcatccaagatgtcataaaaccacagcacagtcataaaacttcactctgggctgaactctgtctgggcaaaatcaatccaattagtcaaaatgcctgaatggagcaatcaatccttcaaaacagaacacattttataagggccttaccggaaaaggcccacaactcagtgctctgacaaaggaagaggagaaaagggcagcagttttaaatttagctgcttaaaaataagtcttaaaaaaaaccctcacttgacagaggctgtacattttaggaagtgcagcaaccacccgccagtgctgcttgacacacgggcaaaacataagctcgcaggtgcaagagacgggaggggggcacggccactcgacttacttagtacggacatcctggcccaaggacatgtgcacgtatatcctgaggctccccctaaaactgtgttgtgctgaagaaatggtccagggagtgtgacaactcatcttctattttgaaatcagaatccacgctggctactttaagcttgaaattgggggcaggaggaggggtccgctatcggccatctggccttttagacgctggctttttttgtttgtttgaatttcggaaatgaaggagggtacacaatacagacacatgataaaggaaagggattagaaatctccaatgtcggagaaagagagaggctcgttaggagaggatgggatgtcggaggaagaccagaaccgcaggcgtttagagagagctgggtgggtcgttggagacttgtctttgtccttgtttttgcttttcaaaaagggactctttttgcgcggaggtgctaaattgttatcaatcggataacccaaaggaggaaggaaaaagaaaacacaaataaatgaaatgaacaataatgacaaatgaatcgaaattagctaaatgtacttaagaaatcagaatcccgtcttgcccaggaaagatgaaaacagtacacagtactcaagaacagaatcagggctcagtaatcatctgtgctctgactcaattaatttaaaggcacctgaacgccaacaatttatttcctcagcgtgtgaggagaattacatactgcccaaggagccaatggtctggatgatttttcggtttcagtgtgccaaattattaaacactaatgcttattaatttagggcccaacttctcttactcatccattttaatgatggggtccctaacagctcagctcacacaatcctcccgttcccactcaaagaccttgggaacattcaatgatccgtttcagggcgctgtaatcaaatactctacctgaagtattcactaatgattctgtatctctaaaataatctttcggcaggatgagttttaaaataatttaaatacctcctttgcatactaaaaaaaacccttcaacaccaagaatcatgatttccttttagatcttctatatacatcctccactccaatcctccactccttagcctctagtgtcttaacaaagcagacaattgggctaacttcctaaactgtcttatagtaacattaatcgacctaaccaatttctgatgtaggattaaagttgataccaggatttccattatttcttcctccacagcaccacctggtggccacagtggctcacaccacagaataagggaccaacttattcaaggctggtgtccttgtggccagttcagggctaggctcttgttcggcatcttcagggacccagagagctttaactggaggcagtccatgcagttaagtgcatgcagttaagagctcaggctccggagtgcggccgacctgcatttgggtcccacttacccaaagcaaatgttttacactgctgagcctcactttctcacctctacacaggggaggccacgtccacctgccttgatagggtcgttaggattcaatgagatgcataaagcacataaagtagttagagggtgctgggcccagagggagcacccaagacatggtggctgctagtgaacatgatcatggtttacagacctgcttgctcacggatcactttggaccagtcaagcatttttttctctgaaagttttcctaactcagactgattatagttaattaattccacttaaagagtaatacaagttgagatgacaaatgtccaaaaattaaacaggagccaatataaaaacctgaggcaacagaacccctctagcttaaaaaaagttaagcttctcatttacttgcatgtgaggcctctaatttttttccttctcaccctgtcttacggtgctgactctatctaatcttatccccataaagaatgacagtgtgttagtccctgaacaatgtgcgtgaacattatttttgttagagatggggtgtcactctgtcacccaggctggagtacagtggtatgaccatagctcgctgcagccacgacctcctgggctcaagtcgactgagcagctgagactacaggtacgtgccaccacacctggctaaataaaaatatatatattggtagatgggggtttccctgtgttgcccaggctagtcccaaactcctggcctcaagtgatcctcctgtcttggcccctcaaagtgctgggattataggcatgagccactgcaccaggtctttttttttttttttttttttttttgcatctgaaggggacacaacaggtacttgtgaatgtgccccctgaaaggcttgtgcacacaccacactcagagggtagcctgtcgctggtcttcagtgttatatcctccgcctccaagaccccatgggtctcaggcataggctgggtcttcagaaagtcctagtgtcctttgtaaaaatttaaatgacttgggatgcaggcctgggataaataatctccccaaaatgatatttaaaggtaaagctgaaaatttaacaatgtgtaaggtaaatgctgtgtctaatcgattctaagacacctttaacgtcttggaaattaggaggcaatttcagtgatgtctcagtcaccactggccaggtggccacggtgacaaaactgacatggtcataaccaactcatcttggtcctattttccttttacgtgtgtgtacaaaaatcgaattcttatttagaaaagctctttcaacaagagcgtaagaaaaattcgaagtggtggccctgtaccgtttgattgcctcgtggtatataaagtaactgtgcagctttcatggctcctgagagttgatgaaatacagcatacatgatgagaaatcctgttcttgtttcagaacctctggcaaactccaaaggacagcccttagggaaaaggcacagtgtgtcctgtggctggtgggacacaaggccagatcaggctgaagaagtcctaacccacctttcaaagtggtaacagataaaccacccaaggctttcgggaggtcttatatacatggagaacgtgttgagtgcacctgggatctccctgcacaaagcagctttctacaaatctggcacatacgaggcagcccaaaataagctatgtcgcttgtctctatggtacctgcacgaatgtcagctttggatattgagatatctgcccggctacatgatgaatgataccttttgttctaaaacaacaaaagtggttgggcgtggcagctcacgcctgtaatccaacagtttgggaggctgaggcgggtggatcacttgacgttaggagttcgagaccagcctggccaacatggtgaaaccccgtctctactaaaaatacaaaaaattagccaggcgtggtggtgggcgcctataatcccagctacgtaggaggctgaggcaggagaatcacttgaacctgggaggcagccaggctgcactctagcctgggcaacaagagtgaaactccatctcaaaaaaattaaaataaaatataaaataaagtaacaaaagcattatgggacaaaacggtcgccacgctgaatttctacttggctcgtaacacatctaagcgaaggcgcacatgcagtcacccacccctggcacgttcctgcacacgtgtgcacagccaccggtgcgggacccttcaggacacccccttcctcacccgaccacggccaggacggccgcccctacctttccccacagacccgttgtgggcgtcgcgctcttctgcacagttggagcccagtgcgggggtgtcggggttctcggcctgtgatctgagcggctgagaggccgccggcgaggcggggtctgaggactccagctgccagggagggctgtccacggtggattttaagcgttccctcgaaccctctttctttggtttgatgagtttgactaaggctttggctccaatccagtggttcttcctggttagaagtagatgtttaggacatagccagccctcccacacacccccagtgggtccctggttccctaacatgggctgggatgttcttccccagtctgggaagctaggccactcacgtggggttcaggacaatgacgctcatgaccatggtaatcatatttggggctcaggagctagaacttaattctcagtttggcacagggctggggatggtagagccatgtgcattgtgacagaaatccactctagtctcccaggatgaaggaagtgatgccgtgcttaatttagttggcaatttttctgtcaaaaagccatttccatgaatctcattttctgctaaagttaataatcagtgaaataagctggcattcccttgactcctccctggcactgagtaatctgggtgaggtggagagggcagaggagagcaggctgtttgattaaaaatcagtgcatttaaagagtaagcaataacatcacagcgagctggacaccgagggcatcctggtgtgacatgaagagaaccctgcctgtgctctcaccccgtctctgaaacgaaacagcatctatttatattatcactccagtttctcatcttggcttcaatttctgtgtcaaacagaagattcagactgaggttctgggccaggcatggtggctcacgcctgtaaccccagcactttgggaggccgaggtgggtggatcaacttgaggtcaggagttcgagaccagcctggccaacatggtgaaaccccatctctactaaaaatacaaaaattagctgggcgtggtggcacatgcctgtaatcccagctactcgggagggtgaggcaggaggatggcttcaacctgggaagcggaggttgcagtgagctgagactgtgccattgcactccaacctggatgtcacagcgagactccgtctcaaaacaaaacaaaacaaaacaaaacaataagcacacacacaaaaaccaaaaacagactgaggttcggaaattctgtggttctggattcccagagagacctcaagggatttgcagtgattttgacttcaaggctgggccaggacaatccgaagggacaattcctggggctcaggccgtggacaaggggcagcactgctagggtgggccagccccacttggggagagctgctgctctctggggaagagacatgtccatgaagccaccctgaggttctgtgaatccagaaaaatctgcataaggtcaaaaggttcccacatttgaagaccatgggggctgggccaagtgtgctgcccaagcatcctctccaaaataggaacatgggtgtccaggtcatgtttaatcctgagacgaaaacctgacaaggcagccccgccatcctgcttgagtgactccaggaccacggatgctctgcccccttaaaaaaggctcatagctaaatgaagcctgtgtctcattggggtcaccagacattggccacccctcacaggacaagctagagtacagaggcaggctggaaggattctgaactctctctgatgtgggaggcatctgtgcacaggtggatggtgcggggcctgccctagatggctgctttcaccctgtgcacagaaaaggaagcttttaagttctgtctttatgccactacacttaaatcaactcacttctttggaggaggatcatagaacttgtattgatccatgattttttcttccagcttttccttatgtcttcgtaaggcatttaatttgtctctgtgaatataggagaaagaaaacctatcaatccagttttaaatcaaacaagtgaatttactcatcggcccagcctggaacctggtgtacccggggctggtatttttccaggattgagatgagggtgctcaccaccgtcatggtcactgagtttggaatacgggaatggtggcatgcgccgtgggttcagggagctctatgaccctgagatttactgaagcccctgggacccagctgtgagcgagctcaaggcagcaaacttctaacaatctgaaaactcacgctcggaagacccaaggattctccttccaggttgttcaagacgtgagatgctcctggggtcaggcagaacctaccccgcagtggtgacggggcggggttcagggggtacatattaacaacacctgggcagtgaggttgaaaaagtcagctcagcaaagtcagatgcatgactcaggcccattcccactcagaagcaaactgagaagctttcaggggccagaaagagaagttaatgagcacagcagggctggagaaaccaggggcgctagtggggactgcagtgagcccctgtgctgccatctccggcagaccctgctgccacaggggaatgaaccagggcacagtggggcggacttcccgagataccagatgcccagatgatgaagccaaatctcccgattcctaaatattggaaattgagccacttttcaaaaactctgccagggaccaaagagatatctcttgaatcttgggcgggctcaggcacctctgcttaccggggagaccttggccttcctcatacaaacagaaagcttctgtttgcacttagggagtcacggggctgcgcccacagtgcattcggagccgcgctgcccatggtactgaggactgctgcccactcatgcctcagcgctgggtggtcttgagagcccagacccttggtttcctcgtctgaaaacgaggccttacatgagaggtaacagctcattctcgaagctgccaaggtcctgccccaactgagggctttcccaagagctcacggtgaggtgagcccctgtaacaagtgaccccagccacgctccgctcccagtcccttgactcgacatccgtgtgctggtgttctgtgctcacggccgtgctgctgagccttaagccttgagtgcttcatggctggggttggccccacagactcacacgaactccagggcccggagcaggccccaggaagcctgccaacccactggcctggagtagacactgtctaatgcaaaaacgtcatcaaataatccccctgagtgctcctatacttcttccagttagcacctgcccaacctctgctggcgatattttatcaccgggattatagagggccaacttcagggtcatttccaccccacaattacagtgtgcttttacatacaaaccatcctcccgaaggtggcacgccagccctagacacgtaggtgaagccgacagaataacaaaggagcatcgttacatcagagagttgggatagcacaccagtgttcactgtgaccacagtgaccacgtcccaccacaagcacgtcccttcttgccttccccacactgatgccagcacaccaatgcctgcccggacgccaataccagccattcccgatcacgtggaaggacagcccaaccaccatggctaggatccagaaaccactctagattctcgattcctcgacttctgaaccacgagattcctggcaccagggttcgtccccttgccttctatttctggaagcttccctggccctgccagagtagtatcccttccaaaacaactccaggaatccaacatctttagctggacatggaagctaccacagctgagcgcccacctccttttccagccttctctctgggtgcctcctgcacattccccgcacttagaccacctgccacagctcaccttcccgtcctcacctgccacggctgaccttcctgtcccctcacctgccacagcccaccttcctgtcctcacctgccacggcccaccttcccgtcctcacttgccacagcccaccttcccatcctcacctgccatagcccaccttcccatcctcacctgccacagctcaccttcctgtcccctcacctgccacggcccaccttcctgccccctcacctgccatggcccaccttcccatcctcacctgccacggccgaccttcctgtcccctcacctgccacggcccaccttcccatcctcacctgccaaagctcaccttcctgtcccctcgcctgccacggcccaccttcctgccccctcgcctgccacagcccaccttcctgccccctcacctgccacggcccaccttcccgtcctcacctgccacggtccaccttcccatcctcacctgccacagctcaccttcccatcctcacctgccacggcctaccttcctgtcccctcacctgccacggcccaccttcctgtcccctcgcctgccacggcccaccttcctgtcccctcgcctgccatggcccacctcctgtgggcctcccccagaccccctggggtagctgtggacttcaactccccctgttttttttccatgcttcatgtaacccttcacatctggctggtaatggatgaagctctgttcacattttacctccccctactggttcctggctaccagggaactggttctgtgcacctcacagggcccaacaagcccacttccctccatccagggggacacaggcaggtgtacagcactcattcccagccttcagtttgaattctcccccttgagatacttcagtgttctcatgattttttcaagtgaatttaattctagaagcagagaaaagaagtttctggtggtggaaagcgcctctgaaagagcaaacaaaagccaactgagaactctagaaactgagaacattccaggaaactaagggcagtccgtgctggtgatcggtctgtgccctgccctcaggatcccaacgggcccaggggctcctctctgcatgggaagccaggacctccagagactgaggatgtgcagctgtggtgagggtgcggagaggggttcagggactccctgcttacatgtactgcttctgctcctcatggtactgctccttgttctccatgttctgctccagaagcatctggttctgctggctcaacagctggatctggctcaggaggtgatgattttcttcctccaagttccccttgagacgggagagcagctagaacacagaccaacagcgtctcagacaccatgtgacccggtgttcccactgctgggaacctagctcccaaaggaagaaggccactgcacaaagatgttcaacgcagcataatctacgccagtggaaacttggaaagggccaaacggccaataacgtgggaatggctgagttccctctgcagctgcattgtttaatccagatgtccctggcaacatggctactgagcagtaaaatgcagctagtctgaatcatgatgcacaagtgcaaaatacgcagcagattttgaaggcttagtacaaataaaaagaatacgaaaaatctcatcaataatgttttcgtttgtttgttttgagatggagttttgctcttgttgcccaggctggagtggagtggcatgacctcggctcactgcaacctccgcctcctgggttcaagcgactctcctgcctcagcctcctgagtctcagctgggattacaggcgcgtgccaccacgcccagctaattttttgtgtttttagtagagacggggtttcatcatgttggcaggctgttctcaaactcctgacctcaggtgatccacccgcttcagcctcccaaagtgctgggattacaggcgtgaaccaccgcgcctggcctgaagtctgccaacttctgttctagagtatgattggggtgcaatgggaaaatcacaggctttggattccaatacgcgactatgagaaaggaggatgggctcatggggccaccgtaaggactgagtaacatagaggagaacacagcaaaatgcctggtacaccggaggtgggaaacataggctgtcccctcctcttcaccccataagcaattctaactttaacttcaccattaaaagaaaaaccaaaattctacctgtttttaatataattatacataatttatgcatacagtgagaagaactggaaggaaaaaggaggtgaagctatggcattttttcactaaaaatacttctgtgattgccactgctatattgcttgggcaagaattaaaacaaataccataataaagcattagtctccccagtgtagagaactgcacgaggcttgggagtcaggcacgtcacaaacgtggcaagtcagcggtctgcagggtgaaaggccgtccctggaaactcagctttggcccaacagaaagaccctgtgtggccgggggggccccagggaaccaagccggctgggccccacccttcagcccaagtccatgatcctgagggccagtgcatcccagtaacgatgggggagctgctcttccacctcattagatgccgggcaacaaaccaacccaatgtaaggcatatgggctcctggagagaggcgggttaggaggagcggcgagcacggctccgagcacagccacgccctcatcacttcgcttatgctgcttcgcttctgccacagggtgaaccatgtccccagaattcatacagtgaagccctaagccccagtccctagcatgggactgcatttggagacagggtccataaagaggccattaagttaaaatgaggctgccatgagggtgggctctgatccaatctgactgatgtcctttcaagaaaaggaaatctcgacacgtagatactgggaatgagcccgcacagagaaaaagagcactgcctgcaagccagggagaggccttgggagaaaccagctcagccctgccggttcacggatcatggacgtccagcctcccaaccggaagaaacccacctctgcggcttaagccacccggcttgaggtcttttgctcctccagcccagggagacgaacatggtttccatgtgtggcctgtttggggggactggtttgtgctggacctggagttctgctgaacccctccccaaaagccaccatcctggccacagcccttcccttgtcccctctcgtgacctgtgttccaccctgagtgaatcatcagcatcttccaaaaagtacccctgtccatttctgtgcaaatcagtccttcccatgcaaagcctaccacacatgtccagctcttgccagtccttcacttcatcagcgtgaccttttccacggggcctgcgctgcagcccctgacctgaaacctcctggaagatcctgacgcacctgcctgtgacagcacagcccctgggggcgaggattccacaggcagtgccgtggcctttgcctccatcccgcctccacccccgtggggccctcagggtcccagggtctctcattctcagggggcagcacaagatctgggtgggtggctgtgacaaggcatcttggcaccctgcgcctcggtttcctcatttgtgatgtctcacagggctactgagggatctgggcaaaaggcgtctgagactgtttctcaaagagcaaaccttgtcctgaggtgccagctgtccctggggctgtctaggaggtggggtgagacctacgtgctcctccctgccagacctgcctcaccagccttccatgtgctgaggtctgttaagatctcatctggagagggtcttgctgcgtgaggccatttccaaccttgtgtactagaagggacggctctggaagccagggactcccgagtgagctccgtcccagaggcagccacaccccaaaatggagcaaattcacaccacttctctaggacagtgtgactactgaactgaagagatgtaggaagacagtatagacacagctaagaggatcgagataaaacatcatcaaccgtccccactgtgcctctcccgaccctgcaaaaggtgacggtcagacaggggtgttttcgtatacagtcccaccagaagccacaatgacccccgtcagcacctctggcttcaccgcagcctctgtgccacctccacacatttctgtctttgagcacaaatgcccatgaggacccctcacagcttggctgagccctgggctgtccccttgggggactcatccctgtctcccgaggctcccctggcgctggcctcacctcacagtggttgtccagcttggtcagcgagatgtccatggtctggtgctgctccttcagctcgtcgaagcgggcctgccagcggttgagctccagctgcgcgttgttcagtgaggttttcagctccttggtgtgggcgtgcagctcctcgtactcccccttcagctggtggtgcaggaaattgaccctggaggaggaagagtcacagggcaaaggagctgaagagcctgacaaacaggtaacggcccagagacctgggctatgtcccagctctgacagtggcaggctgtgcaaccttagacaaaatcacaacctctctgggcttttttttttttccatgcataaaataaggagcttggacaaaactgtccatcagcaaactgtgttctttggggatgcatgagggtacccctgatgccactacactgagcctccagggagactgagcaggcaagctcagacacctgtttcaacacagcatcactgctaccatcacttccatgctacagctttggtatctgtgtacacttgaaaaacaagattctgctgtttaaaaaaatgtttaaaccactaaactagaccatttttgctctaaaattctgtctctgcccagctcttcttcccaattccaagcccctttctaatttcagctcgtgagataaagtgtgagatggtgtgtattatgtaaatctattaaaattgctatcatcaaaacaactattatccaactgggagttctctggagatttatatcagaaagctcattaccagggtcttgtggacttgatttggacatagacgtgtcttatttggcctgtacaattttactttttaaaaacaaattagttgaccaggtatggtggctcacgcctgtaatcccagcactctgggaggctgaggagggaggatcgcttgaggccagttccacaccagcctaggcgacatagtgagacccccatctctgcaaaaagtagaaaaaagttgccgggaacccgggaggcggagcttgcagtgagccgagatcgcgccactgcactccagcctggtgacagagcaagactccgtctcaaaaaaaaaaatgttgccgggcatagtgacgcacacctgtgctcccagctacttgggaggctgggctgggaggatcacttaggcccagggagttaaggctgcagtgagccatgatcatgtcactccagcctcagtggctgagcaagatcccatctcaaaaaaaaaaaaaaaatttagtggccagcattaaaaaatttgaagtttacatcaatacccaaacattcaggttctcttaaaatataaaaaacaaaaggctgcccaggcagtcccgggcccgcctccagctggcggcctttgctggagccgattctctgctgcccttttagacgatgtgcattctccgttcaacagtctgtggtctatgtctggtactgtttcacccatgtgctttatttgcctggggagccaaggtaactgagtttctaaccccccgtatacacgaactcgagtatgtgggaggaggaagaatttcgtatggtcaagcctttgcaatgagacaggacctggattccatcctgactctgctattcactagaaacactgactcggaacaagttatttaatctctcccaacctgtttcctcatctgttaaaaagaaagccaaaaagataacaatagtatagtcgattctcattatgtgtggtagtcacattctataaagttgctgtaaacactgaattagtgaacagcgaagcatccagcctagggaaaaaatatagaattaggttcccgggagcctctggccacatttttgttactgatcaatacataaccttgttttatgtgggtttctgtttgaagataccttatgcagcaattcacagccaacagcactataactcatgcctgaacaaagcttatctaagactttttctctgtaaggcacatcacagccaccttctgcttagggacatgaaacagcacttcagtactacaattgtgggtcattttaaacagcaaagtcacttcccgaaagcacaaaatatgaaaaccgtggcattgaagagattctgaaagggacatttgtttgcagtaggagctgaaacaagaaggcagcgtgctgtcgtgtgtgccctcagctgggaaggtgcgcatccagtgactcccgcatttcaccactctgtgcgtgtccacgaaagccccacggagactggtcttggggcggcaaataaaactttagcaagtaggtggattcacaaataggggttctgtgaatcatgagcaatctgcagtttctccttcatgagcaagaggcaggcttatgccagatgatgaattcacctgtgcctgatgcaatcctcaccacaagggtgggaggggagaaccacttaactcagacgacgcgccatccccaggtgtcacctgagtgctctcatgccagcaaccagctagagttgccctttagcttattttacccacccagctgttcacacagcaagggataaaaatccacgatcgccaggggacttgaacttctcagtggttgctatgcaaggagagtctgaacagaatctggggtgctgctatgtgcagggccgggcgccggcgctcacctgtccagctcgccccgcagcctctggttctcgcccatggcgagggcgtttgtcctctgctcctgctgcagcgcctctcgctcagtggtcaagaccttctcccgctcctccagctccgccttgcgcttcagcatgtcaccgtgcctgttggagggaagcacctgccgtgagtctggccagggccttcttttccgacaggtaactcacatcccagaggatctgcgtgcctcccgtgagaaaatgggattcctctggagagtctctctgcagaagtgaggggcatggggcagggaacaggcggggagcgcagccactgggagccatgtcaaggccagcgccaagccctggagcccagaatcctcttcctccagcccgttctgtctccatagtccctccatgccctgataaagcagtcgctcttcctttagccacctgacaatgtgatgactacattttctgagctccatgcccttctcttttagggaattataaatacgctactaggtagttcactaagcacaaataaatctaagagaaaccacaaaacaaacagtggaattccgctgcacatcacagctaatctcaccctccaagggctggagaagcctctccctctccccttaggagcctgcatccacttgttcttagtctggccttccccaggggacagaggctcacccaggagctgccagggactagttgtcacatacacacagcagctctcctcaggcgccttagccacagccctcaccgtccccacaactttctccttaccctcaaggctctaatcttctccaggctctaatctatctttgtcggctgcactggccatctcttggggggcagagtacaatgatgtagccccataggtcccggcccctccccttcccagcctgtttcaacctcgtgtgttcacgggtgacccaggatctcctagcagactggaagtgttgagaagtctgaggcacagtctcctgatctttcccattcaggcaaattcttctctacagaccccttcctgagtgtctcacacccaaagacaatctgacagaggctagccagtgtccctggggtttctggcctttctcttcaggactccactgcaccttgttggaaaagcacattaatcaagcatgtctctaaccattagcaatgacccaactgtagggcagaaactttataactcttactcaccactgaatccccgtgtgaggaatgacacgtagtgaatgcttgttagagcaatgagtgggtgagcgtctccgattttagtgtcaaatgagaagaagagaaaaccatcatccttgtgtgccatgtacctacactcctaaacctgtagccctgctgcagacacagcaagggagcctccagtcatctgtccaaccagcaaaaagcactgagtaactaccacatgctgtactgagcaaggacctgcagggaaaacaacagtccagactccacctgccaaaacctttgctctctgaatgcacattaagaatacaataaggggtcagcacggtggctcacgcctataatcccagcattttgggaggccgagacaggtggatcacttgaggtagggagttcaaaaccagcctggtcaacatggtgaaaccccatctctactaaaaaatacaaaaattagccgggtgtggtggtgcatgcctgtagtcccagctacttgggaggctgaagtaggaggattgcttgaagccgggaggtggaggctgctgtgagccaagatcgctccactgcactccagcctgggcgacagagtgagactccatctcaaaataaagaaagaaggaaagaatacaatacagcattatttaatacgacataacataacactaagaataaggcacgcaagtgcctggtgagtgctgggcatcatgctagtatcagacttacacgaatgcttcattagtttgtcagctgggtgcaactcctaccatgtctagacacagcaccacgtacacaataaatgtcacacaaataacaagatgggtgggggaagacgagggagagatcaaagtgaaaagaggcagaagatgctactttaggccggaaggagtagtcttatagtttcagatgcctcaacagcccctgaaggatggagatctggatggataaaaggggtgaagaactccagatagagacaaaaaggaagcacttggcaagtgaataaatgaatgtcatcaccacccatgaacccacaagcatcatcagcgcccgcacaaggcttttgtgattcaatgacatttgtggctcctgaccgtggagatgtcctccccactcccaccttgaagaaccaacgatcacttagccatgttgttgaggcggctccaaaggatataccatcagcagggccatttcccaggcaaaggaagtagatcttgctccctctgttgtactccaagtacctgagagcctctctttagccatgtctctctcatgcatcagattcaggtgcacatcacacctgcccctcagactctggagagcagcatcctacctctcctagccctccctggatcctgccatgccctgcgcaggtgcctggtaccatcactgatcagcaggagacagaatcccagcccagattggctgacttaatgaatacaaaacccaagaccatgaactgtcaagagtgcaaagttaagatgtgtgcatttcaatgtaagttttacctgtaaaaaatggggtgagggtgtggagagtgggaggtgcacatgaaatgagaacagcaggacataaatgactgtcgagagtgcatgatgcatacacaagagtttcactatatgattctgcttcctttctatatgttcggaagtttccataattaaaggttaaaaatgaaaaaaagcaagcgagaccttgatatgaaagagaagagctgggaggccagagaaggcatacccctacaaacggagccgtggagaattccctccttatttctgttttggggagaaaagagacagaagagaacccttagggatcagggccccaaaggcccactggaaatagtagaggcatccccttctccacacaggagcccctcttactactgtcttcagttgcacaaattccaaattgctaaaggtaacgtttatttccttccttttgggaaagctcaggtgccccaacaatgggaagcagctggccaagagatttcctgcaggggaggtccagggaagtcccagtcctccgcgcagcctgacagactccccaggcctggcctcaggccccgctgcaggcctacccaggggccccacctccaccctccttcacctcccctccccacacaccctgcctctcccccgggccctgcccacttccccaaagccctgcctctcctgagaccctctcctgagaccccacctctgctccaggctccacctctcctccaggctccacccttctcacgaggcccccgcctctcgtccaggctccacccatctcccccagtccctgcctttcccacaggtcctacccacctcccccagaccccgcctctctccaggctccacctctctccccaggctctgcctctcctccaggctccacccctctccccaggccccacccctcctccaggctctatcactctcccccaggtcccacccatctcctccaggctccacccatcttccccaggccctgcctctcccctaggtcccacccatctaccccaggccccacctttccccctgggcccagcctctcctctggactctacccctccccagatccccttccttccccaggccctacctctccccgagctccttgtgctccagctccagattccgatgcagtgtctttaggcagctgtgctggcggatgagggcctcgtactcggccgattgccgctcgtgcagcgtgcccaggtgctcgtggtcctgcagcagggcctcgtaggccgctgtaagttgctcctgctgcctctgcaggctttcgttctccgtctccttggccgtgtggtggttctgcagcagcgtgtactgcgcggtgagcgctgcgctctgggaactcagcgtggagttctccacctgccgagagggagaagcgcggcgtggcgcaggccccacagtcagcgaggagggctggggagcaggtcaagtgctcgagcagacacgaaaatagccgggaccctcagggcagaagacccagagggtacccaggatggctgttccagaacttaagcaactgctgtgggaaggggactaaaccgcatagacgggcactcagagggtacttcagtcctgagccactcgccacaaatgtgagctgctggggcagatgatgtcctttccctggataactcccttgtgtgctgtgccctctctgactattttttaaaaacctcttttcagctgactgtggtggctcaggcttgtaatcccaggacttcaggaagcagaagcaggagggtcacttgaaccaaagaattcaagaccagcctgagcaacatagtgagaccccatctctacaaaaaaaaagtatttttaacttagctgggcatggtgttgtatgcctatagtcccagctacttgggaggctgaggcaggaggactgcttgagcccaggagttggaggttatagtgagctatgattgcagcactgcactccagcctgggcgacagagtgaaaccctgtctcttacaatgaaaacagaacctattttctagaacaagtatacagaatatctgtaaataaggatatagaatacctgaacaatactatcaacctacttaacataattgatatttgtatacctctccatccaacaacatccaaaatcatcagaaaactgaagaggagggaatacttcccaaatcattttatgaagccagaattaccctgatattaaaaccagattaagactgtaagaaaaattcaaaatagtaagtcaatatactattttcttgttaccagaacaaattccgatttctttgccaaacagtttcctgttgattgtccttgccccataagatacatattttcaaacttttctcagaaattgcaataaaaagccaggtgtggtggctcacgcctgtaatcccagcactttgggaggtgaggtgggtggatcatttgaggtcaggagttcgagaccagcctggctaacttcgtgaaatcccatctctactaaaaatacaaaaattagccaaggcacaagaatcacttgaacctgggaggtggagcttgcagtgagccgagatcgcaccactgcactccagcctgggtgacagagtgagactccatctcaaaacaaacaaacaaaaactgcaataaataatttatttccccacagtctataggcgataaatgaaaacaagcatctgaagtggcacacaacctagttctgcttgatgctctcaacagtctgggagccacttaatatcctacacttccctcttagagattaaaaattcacattagcttaaaaagaaagagttctgccaggttctacagtaaagaaacctggttaactttgttaaaccaagcttaatcctgaaacctcttttccaagtcagtcctagtaacacttcaaggaaaagactggaaaacatggacaagaatgcaagtaaaaggagagaaatgaaatgaaaatggcccatgcagccattttctcaatcactgaaaatggcttaaaaactatcacccccttcactgatcactgtttacagcgggtctctattaacaaaatcccaaactgctttgtgctttgatctgctgcttttgaggagtcctaatgcccccagttggtccccaggagccacagataaacatcccgccaggcttgtgaccactggtgttgggagccccgctcacctgcagcttggcggtctgggtctgcagtgtggtgttgtgctcctgcaggaaggcgctctgtttctgcagtgtcaagatctggctgctgaaggtcacgttctgggtctccaggtgctgcagctgttcctttagcagctgcttctcagcctgcagagctgcattctagaagatcgggaggcatgagcgaatcaaactccaactgggtaaatgctaactggccacaggtacttgggttgtaacgaaccctcaaaagttgatgttttgggggccaaatcgagggtccgctggatgaggtcagtatattttctctctttgaaaaagataatcagcaggattttttttaaaggctacacatcatggggacactgcctgacacctgcatatgtgagtgggaggtgaatgcatgctggagtaaaagctgcttcctttgtctctttaatgctttcctttgttttctgttgaacaccctaagagtgcatttctgtgagctggttccatctcccattgactccaaccctgagtatctcacaggacagggagtcaaagccttaggctacagccttactcagaggtgacagcaagtagaataaggcacttcacattatgtgagactaataaagaccatgttaaagtttgccaccaactgggctaagggccaggacctgtagtcttttactatcccttattagcatggggctttgggtcaagtctctgaaattctgtttgagctttatcatcgatcaaataatgaaaatcaccactctgaacttcataaagtcattgttgagaatcaaagtcagaggcacggacatgcattagcagactttttctagaaagggccagataggaaatacttttgggtttgccagccatggggtttccatctcaacctaaagaatcattgtcactgtaggggaagcagccccagacaacctctaaacaatgggcatgactgtctgctaataaaactttatttacaaaagcaggtgggggctggagtttcccaatccctggtactgggcactgaaagacacaacactacaggaagaggctgaattgccatgaaggctgtgtgtgcccctgatgtgagaatcacggaagggacctcaaatgaagaggggcccacaggacctgcaactcaagacgtgtccaactagatctggctaaatctcctgtgttctttacagcaatgacaagtcatcaatgggactactgataaggcagtctctctctctctgtccccgatggaccatgcccaggccagcccactcacattccgctccagctcgatggcccggtccttcactcggagaagctccatggtggcttccttatggccgggcccccaggcctccttcccctggtgactggcggctgtcttccccgcagggtgcttgaaagagttctgcaagtgctgcccctctccctggttctgcctgagggtctcacactccttctttagctacaggtgtgacaataagcaaggaggctttaggcggaagcagcctggcctggagccccgagtgagtggctgagggcaacctgcaccacaccctccacactccccatactcgcccgccctggtctgtgtaagccagacgcgctccttttcttttgaggggaaggcaccaaccctctgccctacattttcccttcccttccagagaggacagggaggtgggggcctgcaacccgttcctgcctcagtccctgctttagccatgtggcttcctgctttcctgagcctcagttatccactccctcaaacagaggtgaggctgaggatacaggaggtgaacagggatgaggtctcaaagcccctgctggcactggagcagctttatccagattcctattcaatcctgcagccaagaagcatggcatgtgttcaaaactgaggctggaagagtgcgtgtgtggaaggggggagtgtgcacacctgatcacctgtgagagtgtgcacattgagagcacgtgtcgggtgtgtacacctgtgtgtgaggagcatgtgtttgtgtgtggagtgtgcacacacgtggtgggcacatgtataatacatgtgtgtagagagcatgcatgtacatgtgtaaggagcatgtgcatatgtggagagtgtgtatgtgtggagaacacacatctatatgtgtatggaaagtgtgttcacacatgtggcaaatacgtgtgcatgcatgcacccagaagtagacatgtgcatgtcctcatgagtccctgtgcacccatctgtctcatcagagggcacccgtgagactctgcaggccgttgctcagtgcccaacgtgcagtttcatggagggctctcaggggtgttcccgtatcttgcctggtggacttggtgctgctctaggccactgcccgcctccccgcaggcctgtggctcttattctggttctgtttggccctagtgcgtgtgattctgagggtggctccctcagtcactctgtggcgcatctacccctgccctagaaaatgggtatccaggccaccccactgctatacaggtgaggggctggaaagggtgaggctgagaatgggcagctgggccccacagtgcaacctccacactcaccatctgcagctcactctctaactggcgatttaggctcgctttctcttccatctgtgcttctaagagcacaatcttttcttctttcatggctagtgttgtttttaatgctgattcatttctgccctccaaaatcttgtattttctggaaaacacaaagatacaatagtatcacttatctacttcctctccgcaagttcccagtgtcctcgctgccaacacatcactccttccattaggctgggttacggagctgctgcagcttttggcccagaagaactcacgagccaaaactcatcttcccagagccctttggggggttccctgggtagaaacacctgtgaaaccttcaaaggcgacaccacggctacagttttacagtcactgtctgaggcaggaattattattgccattttaccgaaggggaaactgagtctcagaaaggttaagcaatttgcccaaggtcacagtgctaggttaagtggtaagtctaaggcctttccaccagagaggactcctactataaggcatgtggatcttctcggttacaagtccaggaaaagtccaagatgttcgatttcccaaaaaacaagatcaggccgagcacagtggctcatgcctgtaatcccggcactttgggatgccaaggcgggaggatcacttgaggtcaggcgttcgagaccagtctggccaacatggtgaaaccccgtctctactaaaaaaatacaaaaattagctgggcatggtgatgcatgtctgtaatctcagctactcaggaggctgaggcgtaagaatcacttaaaaccaggaggcggaggttttcatcactgagccgggatcacaccactgcactcctgcctggatgacagagtgacacttcgtctcaaaacaacaacaaaacccattatcatttaagcaagcattgcagggaaaaactgtaatagtctaattttttaaaaaaattaagaagcgtggctgggagcagtggctcacacctgtaatcccagcattttgggaggctgaggtgggcagatcgctttgagctcaggagttcaagaccagcctggctaatatggcgaaaccccctctatacaaaacatacaaggattagccaggtgtggcggtgcatgcctgtggtcccagctaggtagtggtctccagctagggctggaggatcgcttgaacccgggaggtggacatggaggtaagccgaaatcataatactacactccagcctggacaacagagccagaccctgtctcaaaaaaaaaaaaaaaaaaattaagaagctttttcatcagacaaaatctccttccacacctatctgagaacctcaaggaacaagagctggaacagaaacgaccaaggaactttgggttcaaggaaccgcgtgaggtcacagccctcggcagtagagagttcatggaggtctcaggggagggtgaggagcctgcagactgaacagtggaggaagtgctcccacgatggggagagggagaagaggccctcacgtgtcactgccgctgtcgtcctcctgcaacagcagctccctgttgaggccgaccttctccagttcctggctcagcttgtccagctcactgctgagctgctggctcttcagcttctcgagcaccaggtcctggaatgatggggagagagcactggataggagctcagcaaaacacgcaggaaggccaggcgccagtcccgcccgggtgtgagcaactgtcctcccgggccacggctgcctccgtgtggagcgaggggactctgaaccccagggatgctcttcccgaggaaagccaatgaatgcacttgtccagccctcctggtgctgaaaacaaccagaccaggtggctacatgtcaggatggatctaatatgccacttctctaagtcatgtatttgaaatgccacttatgttgacctttaagtagtatgtttgatttctgataatatggctgacttttcaacaaagcaacaagtaattaaaggccccttgtagacactttgaaacagaaaatgtgtaaagaggggaaatattttattttaaaccctggatctggtttacttttcattttttagagacagcgtcttgcttggttgcctaggctgaagtgcagtggtgtgatcacagctcactgcagccttgaactcctggctcaggtgatcctccacctcagcctcctcagtagctggaattacaggtgtgcaccagcacacctggctaatttttaaattttttgtagagatggggtcttgctatatttccaggttggtcttgaactcctggcctcaagcaatctttctaccttggtcttccaaagtgctgggattacaggcgcgagccactgcacccggccttggtctacttttcaaaacatgggtgttgaatgcatgtcggtggttcacttcctccaccccagtttacgtcagcacctctttgtagctctctagatagtgaccgttttctgcctggtgtcacagtcattcgcatgcacgcttaaccctcctaccaaatcctcagacctgaacggcactgtgacagagacagtgatgctcattacctgctcccccaaatttcccagccaccctgtatcagctgaagccaggtcaccagctctggcaaaggggatgaagtgggagtgatgtgggtgactccctgactggagcacagaagagcctatgtgtgacattcagctgccctttcacctgccatggcaaccgcccaagcctggtgtagagaccgtggagccacgagatcaaaacagcctggactgctgggtcaagcagaggacagactccctgaagggtcccctggactctggtgagcaagaagtaagccttggctgtgatgagcagcagagatgctggggttggctatcgtagcacagcctaactaacctacgctaacgagccggggctctgcctgcattcatattttggatctctcccccacagcacatggaattgcctgcatggatcgtcagtcatctctttccagtgtggagactgctcagtgttcaccaaacccatttccttctcttgtgtggcatgtggcaccctgtggttgggtgtggctgtgctgctgagccccacccatgcagcatgatcttcctcactctctctcttcctcctctacccaccacaggccgaggaaccagaagaggactccactaggggtgcccaagcctcaagatggcagaagccaggtgcctgaactgggccttaagtgcagtgactccagcgcctggcttctcccatgtgggcagggtccccacactagacccttcacgagtgagataaacggtgctgggccactcagctgctgaagccatttcccagagcagccatctactcaccccagcatactaaacaaatgcccaggtggcccacacaacacttaccagggtaaggacaacatggaattctggaggattttatatccctcaagagactaacacgttcacactctttgaccctgtaattccatttctgagaatataccctaaaaaatagtttgattcatgaaggtctatgtatacaaggatgtctagtattatttaaaatagtggaaaagaggattctaggaaaaaaggtaataaaattttaaaaataaatttaaaaaaaacttcaggaaaggattctaggaaaaaagtaataaaatttaaaaaataataaaaataaaatagtggaaaacactaaaacaatctaaacatctaaaaaataattacagtaaacctataggattaaatatcttggccaggtgcagtggcccacacctgtaatcccagcactttgggagcctgaggcagatggatcccctgaggtcaagagttcaagaccagcctggccaagatggcgaaaccccacctctactaaaaatacaaaaattagcgaggcgtgatggtgcgtgtctgtaatcccaatacttaggaggctgaggcaggagaatcgcttgaacccaggaggtggagcctgcagtgagctggggtcacaccactgcactccagcctgggtgacaaagcaagattctgtctcaaaaataagtaagggtcgggcgcggtggctcatgcctgtaatcccagcactttgggaggccgaggcgggtgggtcacctgaggtcaggcgttcgagaccagcctggccaacatggtgaaaacccgtctctactaaaaatacaaaaagattagccaggtgtggtagtgtgcatctgtaggcccagctatgtgggatgctgaggcacaagaatcgcttgaatctgggaggcagaggttgcagtgagccgagatcacgcaacaacactccagcctggacgacagtgagactccgtctcaaaaataaataaataaatacataaacaaacaaacaaatatcttacggccattgggaaattgtggctttgaaatctaaaataacaaaaaccacaacataattaataaaaaccacaacagctcacctgtgtgtaagtatgacatcaagcatgtgtctgtacacacgagggaaaatgatgaaacgaaacaactcaaactatgagaagcgttatctctgggttgtaagattgtaatacgtggtattcactgggttcttagacctttaggtattgctgtttagaattagataaagcatttaaggaggacacagagtcttatttctctcctgaaaccatgcaccacagaacccactaccaccatctgccaatccccttacaggcgccgcctgtgtttgctcacctccctcagagttgtcagtgtccttgcatgcacggtgacttgcttggtgaggtcccggttgtccttctccagctccttcagcttgccggctgcgtccctgcagcgggccagctccttgtccagcgcgcggctctccttctcaacggcggacagtttggcagtgctatcgtccaagactgcatccttgagctccacctgctgccacagccgcttggcctccttctccagcagcttcttatccttctcgagctgggccacctcctgctccagggccttcctgtccttctcggccccctccaactgtgcattggccagccggagggcctccaggtcccgccgcagcgcctggcgctcagcctccagctcgcccagctcactctccaaggtctgcgtcttgtggctgctgctctccaggctctgctgcagccggaggttctcagcgctcacgctctggtagctgagctccaggcgctctgacttcttgcccagcgccttgagcagatccacgttcttcctcagctcctccttctcacgctccagctgctggttctccctctccatctgtgccagcttggtgctggtgaagcgcatggtctccaccagcctgcgcagctccaggttctctgcgtccagctgcttgttgtcacgctccaggccctcaagctgcagggacacgttctgcaaggtgtccagagacttcctcagagtccggttctccagctgcaggccctggctctcatgctccagggcctcgactttctcggtggctgtctccagggaggtcaccttcctggccagcctcccgttctcctcctggagtcgctgtagctccctctccagcttctctgcccgctcccccttctccttggcctgctccaagtccctgtgcagctgccgcttctcaaactccaactggctgagcttgccattggcctccgtcaccgtctggtggagggctttgttctccttctccacgtctttcatgcgggcctcactgctgacctgcgacctctcccgcagcgaccacatggctcggttgaggtggtccttttcctgctcaaggtccttgatctacgggaaaacacaacaggcacaacccaggctgctgcaggaacctatttcagtgacatgggctcacactggggatgggagagagaaggccttgaacggctgtcctacctgtgctcagacactgcctgtgcgttccccagaggcttgacagacacaggtgagtgggcacagacaccaccacttagatggttcaagtcagaatacactcagagcagccaggatgattttaaaatgtaaatacatctctctccctcacttaagtttcagcggtttctcttggtctctggtagccgggccctgcccacctctgcagcctctgcttacactactctccacctcctgctcactgctcctagcccagctgactgtgaacactttgcacatgctgatccctctgcctggagtactttcctctggctatcagcctcactggctctttcttatacttggggtcagttccccaaaacatcctggcatgatgattctaaggtagccgtgtatcccagtattctctccctcagcaccctattctctcagtagcaccctcctgagatcatcttgcctgtcacctggaagtgtgccttcctggctgtgagcaacatctgggcagggccctgtccgtctgtttaccatgcaccattctaaccatcttctctgggctttttattcctctactacagatgccaaaaagctaaaatacttggggccagtgatggtggctcatgcctgtaatcccaacactttgggaagctaagacgggaggatcacttgagcccaggagttcgagaccggcctgggcaacactgtgagatcccatctctattaaacaaaagaaaacataaacaaaaacaaaaaactaaaatacttggtgccctggcattctttgcaggcagaggtagccacacgttagttctggccaacgtgacgtctacggagcatccttgggagggtttccctgtgatgctaagccctccacctttctcctgcttgtaccttagggatgtgcagcagccactgctaaggctggcagagctgtaggcaagaggcctggttcctgatggcatccctgagccactacatcagccctggactgcccgccgtgtgaggcaaataaaaccacacggatttgccagggttctcagctggggcactaagaacatttgcagatggagtgttcctgacctgcgcactgcagaatatgtagcagcatccttggcctccacccactccatgccaggagcaccaccccctctcttccccggggtcacgacaatcaaaaatgtcttgagacattgccaaatgtcccttgggaggcaaaattcaccccaccttttcccaccgccagttgggaaattgagaattgctgatttaagctgtggctaagctaggtaacggataatccatgcatccacaatacagtaccaggaatggctgtaatcccggctctccgtcttgcaggcaggggttctaggagaggcgttagtggtggaggcacctacctgcctggctttgtcagccttcagggtctccatgtcactctgcagctgctccttctctctgatcagctcctcactgagggtctccagatcttggttgctctgcttttctctctccagctgggtttgtaacttttcaatctgcagaaccaaaagacccagcccagtgcagacatcagtcctacgaagtgaaccatgatttaaaacaaaacagaaaccaccccaacagaatgcactgatgggtcttttctcaagggaagacctcctgacatcattctgtagcaactccccacaccacagctgtcactcttaagacagaaagtcaccaggaagcaaaccatcaccatccccccagcgtccctctgccccatccttgctgccatgtgctccaccgcctgaggccgccaccgctgggtgccctcgggggtttcacacgcacccagcttcctgtcctcctggagacttcctgcctcagttggtgatgtcacctggctgctcaagtggccctctgttatatctcttcctctttcacctccatggaaatgtgtcaccaagccctgtccttcttaccccttccacacttccaccatctccctcacaggccaggccacattttgtctggcctggacagccacccagtgatctccttgacatcaaggtcttatgccagaacccacctgttcgcagccctcctaaacatgaactacctaaacagaggtccttatgctccccgttgcacacgagtgcccgccttgctgaaatgcagattctgactcaacctttttttttttttgagatggagttttgctcttgtcgcccaggatggagtacaatggcatgatcttggctcactgcaacctccgcctcccagattcaagcaattttcctgcctcagcctcctgagtaactaggactacagaagcctgccaccacgcccatctaatttttgtatttttagtagagacgggatttcactgtgttggccaggctggtctcacaggtgatccgcctgcctcggtctcccaaagtgctggggttaacaggcatgagccactgtgcccggccaacccttgcatttctgattgctgttgcttctggtctaaaggtgtgatttcctgggtcctacctacccctgatggacccctcatctttctcattctgtggttctttgtcctatactccggtccatccccgaagaagacctgtgcacctgatgaacctgctgggctaaggtatgggatggctgcagactttctggcccccagagggtttcctgtcctccctgcagccactggcatgggcaacagtctcatgtggtgcagcattaggttttcctgggagttgtgggtgccaggaccctgcccctcagcccccaggctgcatgtcttcacatgagctgctcctgcctctcatgacaggcccccaaagggctgcccctcttcctctaaaaataaggattctttttccttcctgactcaaagaatgaactcttatgacttcaatacaaagctacagacacagaggagggagggggcttctctaggacccatggaggtgccttgagttagagagaaagatgttttaacttcagggaactatggtttccagaggtcccagaccaaagcaagcgtgcagcctgggctacattcggggtgagatgaagagccaggttggcactaggggccccctgtgggactcagcagggccaacgggcttgcttactgactaggaaatgccagctggatggctgaggttggagagggaaattcaggatgagctgagctggctgagggttgccaggcctgaagcacagcctgcctcctgctggtgctgaagggttcacctgtcaaatgctggcgagcaccctctacgtgtcagactctgggctgggcactggggccaataaaacagtcagtgagacatggacagagagtgaagggagaaccaccctgcagggtcgggccagattccagccaggctcagggcaggccaaggacgagagggaggagagagctccaggcttcagacacaggacagccctgcctgcaaacagcggcccctcccttccggcgcccccacgaccagagagtgtgtgccaagacagggcctcccgagggccacggcaggagaggctggcgtcgggccagggaggaagtgggtagggcctgagagatcagcataaggagttgtggtgggtgggcgacgcccccgccaggtcctgtttgtacagaggaggggccacagcagacaggacagggcagagagatgcctgggcaccaccctggtgacctgccagaaggggccccaaaatatcactaggccagagagataatactgcaggctttctggggcagcgtcgtgaggacctgcagagctggaggttctcatcttcctaaagggcaattatttttatcatggccaaggttgggctgccacttatgaagacatttcccgtgctaggcccacatgaatctaagaaaccaaaacactgagtcagccacagtggctcacacctgtgctcctagcactttgggaggctgagaccgaaggactgcttgagcccaggggtttgagaccagcctgggcaacataaagagaccccagttccaaaaaaaaaaaattagctgggcgtggtggtacgtgcctgtggtcccagctattcgggaggctgatgtgggaggattacttgagctctggaggtcaaatctgcagtgagccatggtcacactaccgcactcctgcctggatgacagagcaagaccctgtctcaaaaaaccgagtcactttccccatgctgccctgcaccagaagatgtggcatgagacgggggtgtcttctgttgtcctacaaagagaggaaaaaccacctggcagctcaaacgctgcaaggcacacaaagttcaaagggacaagagtgaggagcctcgtagaagtcccatgagggaactcaagggaccagttcccaggagtgggggacctgttcccagcctcagagatcatgaacctgcagagtggctgggtgcagtggctcacattgggacgctgaggtgggcagatcacctgaagtcaggagaccagcctggccaacatggcgaaacctcatctccactaaaaacacaaaaattagctgggcatggtggcacatgcctgtaatcccagctacttgggaggccgagacaggagcatcgcttgaacccaggagatggagatagcaaggaagctgagattgcaccactgcactccagcctggacaacagagcgagactccgtccaaaaaaaaaaaaaaaaaaaaagaacctgcagagccaagggacccaggtgtcctgccacagtcatgcctcagtaaatgacactgccaggactcacagctggatggctgaggttggagagggaaattcaggatgagctgagctggctgagggttgcccatcctgcatggcagtcagcccgcaagaacactctggcctcctccctcgactggaatctgacagctggtgcattcagagcccacagtacaccagtgcctccacagtgtgaggcaggtggatgagaggtcctctgacctggaatgagcaagacctgtcggcaatccctagtctctcattggccccttcctgcacctgagaaggaatctgccatgtgacagggatcctcttaactgtagaacaagactggcttgcaaactctcatctgttcacccaggtgtctggcttctactctgctcccaggaagacctaacagctgtcattaaaacagaacacagttcagctatctcttcttccccatcccataaacccaggggagggagaaagcactgacctgcttgttttaccacagcaagaccctaaggtgttccgtcagtggcctcacacatacagacctaggctttgcagccccaaagatgttcattatcactttagtcaacaactcaacgtctggtattcggtaccttactggttcttctccctgggtccctattgcatgctttataacagtgccctgctctctttttattgagtgcttactatgtgccgaatccgtcacacacactaccacctctaatccccacaacagccagcataagaaatgtgtgtctggggccgggcatggtggctcatgctggtaatcccagcattttgggaggccgaggcgggtgggccacctgaggtcgggagtttgagaccagcctggccaacatggcaaaaccccgtctctactaaaaatacaaaactagctgggtgtggtggtgggtgcctgtaatcccagctactcgggaggctgaggcaggagaatcacttgaacctgggaggtggagttgcaatgagctgagattgtgccattgcactccagcctgggcaacaagaacaaaactcagtctcaaaaaaaaaaaaaaaaaaaaaaaaaaaagaaatgtgtgtttggttgttgctaaatttcctggcacaagtttcgaaaacccttggaatctccaaagggataggtgtctttcttgtatgctaagatgaatgaggactgggggctcctggagagcctcaggatgggagctggttgccaagggaaccaaccatgttattagagagatgaaactttcaggcctcccctacctccagggaggagacagggcctggaggttgagctaatcaaatggcaaatgatgtaatcaatcatgcctatataatgaaacctccataaaaacccaaaaggacttggtcaaaaagtgtccaggttggtgaacatgtggaggtgctggaggggcacccgcagaggacagggtagcgtggcaccactccccgcacccaccgccctgtgcatctgttctgcctgtgcgttgtatactttgtaataaacaaggaatactaagccatctaggcaatagcggagcccacgaagggggtggtgggaacctctgatctgcagccagccgatcagaagcacaggtgacaatccggacttggattggcacctgaagtgggaggcagtctggtgggactgagcccttaggctgcagggtctgtagtgtcagaattgagttaaattgtaggatacccagctggtgtcccccaagaacttgagaactgcttgatatggggaaaaccccacacccctggtataagcagtgaggtactgggagcagtggcgtggaagagaacgagggagttttctttttacaggcaggcaccccatcaaccccatttcacaaatgaagacaatgaggcacaagaaagtcacatgtccgggtcatcctctaatggcagcgaagcagggacagggccacgcctcctctggctctccccagtcctcactcccattcctattataatcagcggtgactgcgcctggattctgtccactgcctgacacctgcatgctctacctggccccctccttgtctgtgctccagacaatcactggggaggatgggagggtgcccaagggttctgtgcttccccggtggcctaaggaggccgaggtaccttcttgctgagctggtggttctccttctccagctccccgcacttgaggccgctctcctccaacaccagggacgcgtcccgcagcccctggatggtgctctggaggctctgattctccttctccagcttcaggatgcggctggacgcacattcgttcagctcaaacacaaacgacttcctggaggctgaagacaaagtccagtcagagcccagtggtctgtgggcctccacttccactctctgccccaagctccgagatggtcatcagtcccggagtccagggtctaaggggctggggaggagctcccacaggtcagctggggacccttcctcctgcccctccactcccagtgcccgagggctcctctgcaggctttgctggggtctgtcagggcagcaatccagggctcaagaaggcggcaggttacagtccaggagccaatgcaagggctgtgtcacttctgggaaccatctggctatcaggctgctatcctaactgtccaatcaaggattttagaggctaacagagatgacacacaggtgacattttccataccccccagagcataatggacatctcggctgctcagcaggcaggggcacgtaactgaccactcccgttggccatgggtggtagaaagctacactggaacatgtgtcgggcacttgtcagcctggatgagatgctatgcagagatttctttctgtgacttcacaattatgttgaagaaaactgtgatagtgtatgcaaattacttttaaaattctaaatgagatgaaaaataagctaaaaatagtaaaaggcagactatctactctgcttttaaacagctcaggtgcaaatggagaagggaagagtcttgagtcaggaatgggagttcctggccccctcctgccacaagcaggtgcatgattttaggtaagtcatggggttgttttggggaggggaaaaaaaaaggtatgcaaaagccctcttaagaaaggagcccggttcttccccccttcatttacccaacccagtgccacgtcctcatctcttggggcctttccacactgttgctaatacagcgattcctccccctacctcttcaccccaggggctgtgggtacaggggggtgatggctttcacagcaaacacataaatctggaaatgtgtgtggttcagattccccgggtgatcataaagactgaacagcatctcgtttccctctgagtcttcatcctctaccaaggataacgacatggaccacccaacaggccagaacgccctaaagacccaaaccaacagcaggcgagaagtggaggggatggtgtgtacctggccccagcccagcactgacacacacataaacacacacacactccacatacaaggacgcttggagggctccatcccaaataagctgtaaatgaaactaacctaacttcaacaccaagcctcaaataagactccattatttcaaaacctgtggtcatctggacagtgtctctgcagaattcatgggggtgaacccatttttaaaattacagaaaaatatatttaaaaagtaccattttagccattttaaagtgtttggatctgtggcattaggtacaagcacacttttctgcaaccatcaccaccatcccttttcaccttcccaaactgaccacagagattaatttttaaggttctgtgagttaaacaatggaatcgatgtttcatttcctcttccattaaagtcagtgccttgaagactattaaaacgacacaatggtttactactaaaacgccagtgtttctctttttttttttttttttttgagacagaatctcactctctcacccaggctggagtgcagtggtgtgatcttggctcgctgcaacctccacctctcaggttcaagcgattctccggcctcagcctcctgagtagctgggattacaggtgtgcaccaccacgcctgactaatttttgtacttttagtagaggcggggtttctccatgttggccaggctggtcttgaactcctgacctcaagtgatctgcccgccttaatctcccaaagtgctgggaatacaggcatgagccactttgcccggcccagtgtttctttactagtgcaaatctcgtcagcaccccccagcaaccagagtaactgggtatgtcttagtaagacagacaagaagagctgccctctacagaacacaccaagggccagagccggggttcctgcttcactgttttctctcactcatcctcacagtcatcttgtgaggcaggttcattacccctattttgcaggtaaggaaactaaagttttaagaggttaagtacttgccctaggtcacccagctaaccagcagagaagccaaggctttatgccaggtctttctggctctcgaagccactgccccatacactcaggctttgcttgcacgatgccatcattctagcaaacactagaatgatgccagctcctagctaggcactaggagttgacaacactaagaataaatcacggtattaactttaaagagctcacacattatagaaaatggtctaaatcggtgaggccttctcaccagccaccatggtctctaacaaatatttagttgatgagagaccatcctagctgcttgtaccacctctctgctccaccagggggcgcccccaacttggacttccagaggcaagggatttgggggaacccccttgtgcagccctcaggccccagaactacgcacagatatcaaagcacagacagctaacttctcacacagattcacagtgaaactggttttaggttcggaactgataggaacccccaaatgcaagaaatattcacctgtttccaataacctttccagaatgcttagatgtctatcagaattttttaaagccacccactaaacaagccaaaagccccatcacaccctggaaagtctaagtaactatgaacttgcacgatcacgtgcacgggaacggtgagcgtgtgctattttcaaacacaggaactggctcattgtttgccggggctgaggcttcctgcgcagggggctgagtgcggccccgcccacgcttcccatgaccgacacctcctctcggggcgcggggcagtgggcagcagagcaagcccaggagggaagagggaaagggagaggcctggcagaggcgctaagaacctgggtctccggggcagcagccactcagcaccctccccacccaggagagagaaaacaggctgcctccatcttgcccaattatgcaaatgaatggaggaaatgacgccctgggtacatttatagcagggattcgtggccactggtgatggctcctgccatccagggctttcagccatccacagatggcctcagagagcctctgggtgtcagtgcactataatctggaagctcccgggaatgtccatatgggaattcggaaaactggcaacacttaatttgtgttttgcgtcctgacatcaaggctgccagacccctcgtgtcttccctggggagaactgtaatgaaacagttccaagtggagcttgaaggaaatcatgtttgcctgggatgaatggatgggctaacatggcagattcagagcccaggactcagctccctggaggcagcggcggccacggccaggctggctccccggcaccaggcgctacctaccgtctgacaagtctgcgttcttggacagctgctccagctcccagccaaggtgggcagattcgttcatgctctgcttctgtgcaatctcaaggaccatgttttcttccagcagctcctcaattcgtttcttatctgtgtcccggtcctggggcaagcaagaagaggcaagaagtgaggctgcacagctggagatccccctggacaagcctcagcccctgtatagctaccgtcatgtgctgtggatgaagatgtactggctcacttccaaataaacagagctgcacagaaacatcccaacacagggccctgctatgagagggaaagccactcaaaggtaccctgacctggctacctaggttatgaagacagacccggccggggtccctaactgaatgctgtctgaacaaagtgacatactgcacagggctttaaagcaagtgtgcagtgatgggcagctctgtggctctagcgaagccctaacaggcctctaaagctgttaacaggctaacaaatcacagctcaccccacaccatcaacactggcaaagacccttcttccaagacacacacacacactcattcctacagaaaagcaatacagaagtcaagtgctctgtttgtgggtgttaagtggcacccgctcaagcctgctgattttagcaagctactccccgcagtcaacaagtcattcgtggtagcagtggcagcagcaacggcagtagcagcaacaaacccagtagctaaactatcagagaagggcacgccataaacctgaacctgccccaatcggttttcttttctttctttctttttttctgagacaaggtcttgctctatcacccaggctggaatgcaatggtgtgatcacggctcactgcagcctcaacctcccaggctcaagcaaccctcctgcctcagtctctcccaagtagatggaactacaggctcacaccaccatgcccaattatttagttttcgtagagatggggcctcgctaggttgccagggttagaactcctgcgctcaagggatcctcccaccttagcctcccaaagtgctgggattacaggcatgagccactgtgcccgagcccaatctgttttcaatgtagtaacaacacagcctgcagtaccaattccaggtcgtgaagcttggatttcagctgcaggttctccttttccagctcatggactttatcgccccgggcccgagcagcagtcagctgttcctccagcatggccttggtttcaattaaaatgatattatcttctctcagctcctggttagcaaaaacatacatgagaaccatcagataaaggcacctgggtcattaggatggaattctaaaaccaaaactctttcaggcatctggacccaagcaaacaatctagagggaagtccgaggcaggaagtttttcctctacttttttttttatcatcttcaccttttttttgagacggaatgtcactctgtcgcccaggctggggtgcagtggcgcgatctcagctcactgcaacctccacctcctaggttcagcaattctcctgccttagcctcccaagtagctgcaattacaggcgcctgctatcgcgcccggctaatttttgtatctttagtagagacgaggtttcatcatgttatccaggctggtctcgaattcctgacctcaggtgatccacctgcctcggcctcctaaagttctgggattacgggcatgagccactgtgcccagcccatcttcaccctttttaatcgggcaaggacaatggactttctctgctataagaaaaaaaaatccatgaatcaagataggctgggaatagtgccaaggctttgacatgcctaatctcatctggacggacaaggggaccctgagcccatttccttaacaaggaaggagtggggttgagagtcaatcctgggttccaggtctgagtctagtagacctcttaattcaacattcattctacagatgtggggcctggaaaacagcagctattcagataaactttcattcaatacactgctcctatctgagtatcttacaaacactcttagataacaaaagttcttggcagtttcctggaaatgggggtctttaagacagttaagtttcagcacagcaaaccacacaaatgtgagctccacaaatgtatacagctgaggggtgcgctggatctatttttgacacaggcagtgatgtgcacaagggaagaagtcagtccagggcgcacatctccactgttcctttgctacgggctttcttggcttctcttctcctgggcccttccaagcaccgctcggtatctggcggggaactgagcttcccccaaatgccttcgcaggttacaaacagcacacgccaggaacgtgtacgcttctttcggtgggcagagctgtctgaggtttgtcccactcacgaatcacactgggaaccaggctgggagtttctacttatccaccatgtgctcatcttcctatgtgggccagaatccaagactcctggtggaggggaagccacacactttccggccagcggacacagctttgatcaaagcctggcaggcggtgaggggcttggccattaagtctctggattcacctgcgtgccctcctctcgctgcctgtgcccagcagagaccacatctactatgtggctggccctgccccaggcaatccatgtcctgccttacagtggccctcagagggaggcagggacagtcccttcctgcagatgaaagaccaattcagaaaaaataagaaatgagctcaaagccacgaacctagtgaggtacaaagctggggcctgacaggccgcagacccggtgctctcctcactgccctcggctccctgaagcccaccctcgaggggcttgtgtgggtgagaggcccctgttgtactaataacacaagccagagcacaatgacgggcttcaaagcagaaagaaggcccagccttttctctctggctactgcccccactcttttgaccagcgttccagcagggtccaccgccagcactccccagcatcactaccctcaggccctgagcaaccaccgcacaggctgcctgctgcttcaccctcacaagcaactcctattcagccttcaagacccagctggagttgtcccctaggagaagtgcttgagaattcactgtgtcccacccaagtcaggcttctgggctcctagtgttctgggtctgctctgaggccacagcaggccggcctgttcctcccccagaccaggaacctcaggcaggactgttgtgcttttgctcttgtgagcctcgcgtaagtgttcaataacactacttggccaaatcatgccacaaggagggaggaatcaaaggcggcatgtgaggtggaccttaaagaactcagagacttcccggaatgaatggagatggccaggagtgggagatggcatggaacagaagatttctaactgctactcaaacatgctgtggttttctggccatttcaacctccactatacataaggtaacagaaacatctcgagtgccctgcacactgcaccaccacctctgaaatgagaagccagatccagaagctgtgtccaagctcccgaagcaagcccagggctcccccgggcacctggcgaggaggagtgggaagccggattccacacctctgggtagctgtccaaggccagaacgccccaccgtggccctgaccacaagtgacctaggaggctatttaaaggcccgacccagcccagcaaacagctgaggggaccacactcatgaagtcacagcccaggactgagggctagttcaggaggctcaagagctcacttctaatctgccactgcgacttggggcagtgattaggcacgggagctaacgggccccgattcccagggctgctacatacactctcaacccggattcctcctttacacgatgggcctaaagacagggtgacgcggagctcggatgatgcgtgtgaaatactccatgcgcagcgcctgagacctacaaactcgccagccgccatcaccaccaactcacaccgacagagcacccccagcactccccacggagcacctatcatgttaacagaaaaaactggcttctagggtgcctcctgacccctgaggagcacacagcaccagagggggtgcggaatcaaacaaacaggcagtcttccgccagggagctctgtagcaaccacgatgccgtatggttccctaagggggccatagcagcaggaggctggcccagggcatcctcagtggggagggtctgggtcagctgactcagggcaggcagacatcctacccacccaggaaacatcacccccgctctgaaccctacctgctcatccagcttcatggacatcccttgaacttcaccgaagacctgcctgtttttaaacttcacccactttgagaagcatgggggacttaaaccttaaaccaaacggcaggtctgtcctattcaacgtcttagtgtgctgaacctcatcacaactcctcagcagttattaaggaacaagggagacacaaagttccaggtgggaacagaagacttccctgtgttcagggtgtccttagtaagtgccctgaatcttgacattccctgattaagtatgatgtgacatgtcagccctaacgtgagctgctggaggctggggcccttcctcaggcctccacggcctctgagacagtggcagcccctcacctctcctaggagtacccctcttgcagcacttcccacaccccctttatttcttccttcctgtgaaggctgaagctcacgttcattcacaggcaagcatcaagtcattcacaggcaagcatcaaggtctggaggcagacagtcattcccatcccaggtccccctgcttagcaactgccatgctgggcaagttattaattaatcaattgtcagtttcctcatctgaaaagaggggaggaactgccagtggctgctaaacctgcagggccaccatgaggcttcagtgcatggatgcagttagggcctgacatcattcccagcaggtggggaaagctccacagatacacaaggtcgttaccactcactgaaagacccgactgtgcacctcatttgggccagaccctgagaatgtgaaggcccagtcaggcaatgttttcagctctgcaggttttaagtctctgtcacaactactcaactccacagagggagcacaaaaagagacaacaaatgggtgttagctgtgttccaacacaactgtgttcataaaaactcacaggggccgggtttgcccagggactgccatgtgctgacccctgagccacaaggtgcatggggcacagaggaccaggggtcagtaaggcacagaccctgtgttcaaagagctcccactctggttgggaaacagacaggaaagtgccacgtgatgagcactgcctgcagtcaggaggggtttcaaggaagcctggagcaggaggctgggagacgcagcccgcacagttcagcgccccacccctgacctggccgcagagtcggaagagagagtggggctgggctgaggaagcacttgtgcaaaagcaccaggagtcctgggggagctgaagtggggagtggcagacgagggtacggtgtgggttttacccaggagccatggagagtggctgcaaaggcctctgcagcaggacagacagaggcagactggccagtccagaccattagggaggcactccgcaggcagactctggagtaacatgagcgaggatgccagtgaggctgagccacactcttcaacacccgcctccggacaaggacatgctgggaggtgagaaacaggcttacaaacaggaggggcacctggacctgggacgaggggatggggaggaagacaaagaaccaaggtggccctgtgctctggcttgagcacccgagtggatgtgactccagaccagagacaggacaggcaggtgtggagggaaagacaatgactctgaacacactggccttgagatgtctctggataacccgggtacactgaggcctggagcgcaagacagagcctcagccaaggattaagatctgggactcgagggtctatgtgtgtgggctaagggaaggcggcagggcaggtgagccatccctggagaaagcccagaggagaagcagagggcaaggggtgaatgagggccctgatactgaggggtgggcctgcgatgggagagtgagtccaggagtggggagagtggaagctcagggaggaagtggtaggaggggctggggctgaggagtgcttgccggatatgtccatgtcaggagcgcccctttactggcaagagtggctttggtaagtggggcgggggtggggggagcggtgcaggcacggcaggtggctccagactgggggaaatgggcccacagctgacactgctttcacacaggtctgcctttgagcccagggagaggcagctggagagaatcggaggaaagtggaaaggtctgttttaagttaaagatgggaaagcctcaggggccctaagacactggactcaaatcaacaaacatgtcccaagcaccttttcctcctgaagatgactgagacctctgagagctgcaggagatgttgcctggggccagaggagggtggaggagggcagaggagctggggccctgtctccaggccccatgggcaaggcagaccaggccacagcagagctcctgccccaccccgttcctggtcaccatggtggggtggagagtgtgcatgtgcacacgtgtgtgtgcgcgtgcgagagagaggagagagaaagacagacacacattctaagaatgatcattagcccagttcctcactggccggtgctggccaacaaccctttctgtccctctggctgacccctcactgcagagatctattccacggtccccacctccttggggcagctccctgttggggaggctccccacggacaggtgcaccccagaataagcccattgcaaacatgctcctacatcacaggatgccaaggtctcagacatgcccgagagcaccccctgctttgacagatggggacaagacttgcccaacacctggcaagctgggtatagactgtgcccagctaggtctctgcccctgggtatacactgtgcccaggtaggtctctgcctctgggtgtagactgtgcccagctaggtctctgcccctgggtgtagactctgcccagctaggtctctgcccctgggtgcagactctgcccagctaggtctctgcccctgagtgcagactctgcccagctaggtctctgcccctcgggctatttgggagccagcgctgcctagagagccataaatcacacaggagcagagagaggccacatccactccgctcaggatgcacacagcatctatgcatctgccctttgcctgcagtagaaactttcagccaattttaaaatacggggaaagagaaccttccagttctctgcctttgtcctcctcccacacagccctgagggcaacccccatgccctggacagcactgagcagaactactgtttacaaagggaagtcagggacaccccacgcccgcccgcacgcttcctcctggaccgagggacacctactctgctactcattttgttttttcacctcttatgtaagctaggctaggagcaaaaatagctgccagacttttgaaaacaaaccatgtacatttgtgttccatgtttttgtaaccaaaattaatctgcccttgccctgaagcccgggtcctttatcttgtcctcccacatggcaggatgcgctctcccttcggtgatgcacaccaatgtgctttacgggttagacggggcagcctgtctgggcggacctggccaccagtgtctcccactgtacctgcaagtgctgcaccaattcgagctggcacgaatgcaataacctctctgctctcctgcccatctcacctaacagccctgtctccaatcccaaggagtcgaaaaactcatgattcctccccttccctcctcccgagactgcaagccttgtaactgcagagcaaagagtggtgtgattaccaagtgccttgtgtgtgccaggctctgtgtacaagcagtcaagtaagacagtcccacctgctggggctcaaggtccacacagaaagcctctggccacactccacccacagaccggcccttggctctgcaaaccctgcctttccggagggaatccacgagtgaagagcctcgggcgggggtcgggggtgcggaaagaagcactctcttcatctgcaaccatattcctccagcttgggaggaatccaagaagtataaagagagagacacacgcagatgtgttcatatttccatttggatgacagccactgacgtatgtgcatctcttttggctgtactataggaatacattaagtaattcaatggaaccttcttgctaatattttaatggtatagatctgctaatgaattctcttcgaaacatatacttactgtaccctgttgctttatgccttattttaaaccgagccttaagggaatatagtattttaacattaactctgccaacaactttatctagcagcctgttaccattttcgtcgtctgtgaaatttatgtccaaagaaaggcaggattacattttttcctaacagattgagttggtgtagtgtgttcttggttatcaaaatactcatacagctttgggatttcgaattggtaaatattcatgatgtgtgaaaaagcatgacatatactgcatgctctcaaccatgtaaaacgatgctgtgtgcacacacaggacacggaaggacacggcaaactgtaaactgcttgcgattctggaggactttgttcttcgcttgcctttttcagtttcctataacgcacatattagttttttaaaagtaaaggttatttttttaaggggggcaagatggcctgggagagggcctgtaaaatgcagatttctagggcctgcccttactccctagggtctagggtggggcccaggaatctgcattttaaacacaaaccctcagctgatcctgatataggtagacacagaccgcatcttgagaaactgagaaatgaagggctgagacttatgagaagctgcttcacagctttaaactgatcagtatttttaactgtttcacaatggatgtggttgaccaggtgtgcactgaggcaaagtgcctgttttcccgctgaccttttacttggaatacctcttctaacactaacattttatcgtaaaaaatataaaatttcctgaaaggtcgaaataattgtatcacacacacccatacacataccacctagatgctacaatgagaatttttgctgtatgtgctttatcacatatccatcaatctatccatctctctaaccacttcatttttattttctgcataaacatacctcgtacttgggtcttttctaatctaaggttttaccacctgcgggtcaacctcaattcacggatgcatttctttttgagagagggtctcactctgtcgcccagactggagtgcagtggcacgatctcggctcaccacaacctcagcctcctccaaggctcaagcaatcctcccacttcagactcccgagagttgggaccacagctgcctgccaccagagccggctagtatttctggcatttccttgtagagatggggtttcaccatgttgcccaggctggtcttgaactcctgggctcaagagatctgcctgccttgtcctcccaaagtgttgagattataggcatgggccaccacgcctgggccacagaggtgtctcttcatggtgctgtctgcttttaattgcataggaactgttcttaaggaatctcagggcaaattccctggaaatatgcatcgccacaccctgaaaaacctggattttcatataaacctgggcacacacttatttattaaaagcaaacacgggcccatcgaagtcacctgtgcatcaaggtaacgccgggccttgacatgaagcccactcagcactggagggagtgactggcccaggcatctgccaccgggggcaagggttcacctcaaccccagcagggctcagatggtacctggctcccatctcaaagcagctcagctccaggcctctgagctgcattctaagttaagtccaacacacacctgagtgctcaggtgggaggcccgccccaagagccctgtgctcccatactcggcttctgcaggtatctgagaaggtggggtctccaatgcagcagagcagccaccagctctgcaaatgcagcactgtccaaagccagctccagattcactcagcaagcgtctctccaacacctcccaggggccagaactgctctacatgctgagaacatgcccatgaagacacaaaccaaactcctgggccagggttcctcatccggtgggactcaggaaagcagtggtagaaagcagggctcgtgcatcaggcagacttggggccacgtagcctgagtgcttaaatgttctgaaacaccccacgccacccgcctcgtgaaaatgcttgatgggcacgatgcacgctgcacaccttccatggctgggccctgagagcccctccagcctcacctctcaccgtccacccagacacaccaggaccttgtggccctgacctcaggtgtctctcctgcacgctgctttctcgggcttccaggcctttgctcctgcctctgcctggctctccctgcttggttaactcctagctatttcaggcctcactttcaacagcacccccaccccctggccccagccatgtttgggtgaggcgccctcctctgtgacccccagcacagcactgatggtgttgcatcctaaccatgtgctgcctgcctgcttccctccccagaggctaagccctgtgggtccagctgtctcttccatgactatatccatgctgctcaattaatgtcaccgcatgaagaaggcaaagtcactcacaatcggaaaggtttcaagtctggaagagggacaagggagggaatcccaaattgttctaagcatcctatgaggactgaagacggtttgctaggctgttgtaactattccaatctgagaacaggtgtcctccaccatttatctaattcctgacactatgggcatccgaagggagtacagctcactcctctcagcagtggcctggacttaatcaaccatgcccaattcatcacctgcgttggcggctcagtgtctgcaaacccacgtttgtctcactacctatccctgagtaaatgtctcatgcagagagacactatttctctttctcttgtgattaataaagtgaatacgaaatctaaggcattataaatctcatggtaattttccactatgaaagtcattaatgtgaaaaatacttgtcacttcacagaggcatgacactggagatgatggaaacctctctaaaactccaagaactccctgatgcagagggcacagcttgtgtgtttctagatcctctgctcctggtgcagcgctcagttaccatgcaggcgggtgctgggcagacgcgtctatgtgactgagcgaggatgctcccacaaggtcaggaacgaacacggagacgggatccccaaacccaccctcctccacaaatcagggtgcagggtgagatgtgggagtcacgttccatccatgaccccactctggggctgcatgaggtcccctatgtgcaggaggagctgctgaggtggtttgtgcatgacagtccccagccctcccacccggggcatttccagtaagcaatgcagccgtcagaagctgcccatgttctggaacccatctgtgccagagattcgtgcctctcataacccagagagccagtggcccatctccaggacaaagctgagaaacggtctaccctccccacccctcgcccaggcatgggctggctttgcacagccttcaggatgctcctcagcaggaggtaaggagccttagcatgcaaagacactccctgagtgggtctgaggaacagacaggtcctcgccacagcctcaccaacccacctcacccagtcccagagcttccagagcctccagggcccggctgcagcacagaacacgtagagatcctgggctcacagccttccccggcaagcccgacagctccacggcagggagagggcaatacggtgctctgccttcggtggcctaagaggccttctggctggtaggagagacgttgggattatttcttagccttgaacaagtccactcaatgtgtgccagtattctgatttcactcagctcacgttttctaaccacttccagccccccttggaataggcaatgggaaaaattcctaaatcctcagaaaagagggtcccggaagctgctactgacatgaggttgtcagggtgagtggtcaaagcatcagagacctcacctgggtctgggtctccatgtagccttgaccctttcacctacatttttcccagaaccttgataagatttaaaataaagatagagtagcctccactagctgatggctatggggcttgcccaacaccagttacatctttgaaacctcatagagccataacaataattcctattttatttttagggacagggttcctctctgccacctaggctggagtgcagcagtgcaatcatagctcaatgcattgcagccttgacatcccaggttcaagcaatcctcctgcctcagcctcctgagtagctgggactgcaggcacgtggcactatgcctggctaaatttttttattttttgtagagacagagtcttgctatgttgcccaggctgatctcaaactcctggcctcaagcgatcctcccaccttggtctcccaaagtgctgggaatataggcgtgagccgctgcacccggttgcccgttattcccacagatgaggaaatagtcctagcaaattagccacagaaattgcaagaagtcttttaaaagacgcacacggatagaaggtgatcataatgccatgaggtgggggcaggagaaaccctgaatcactgccttacatcaatcaattacactccttaccctcccctgctgactgggagatgaagaggagcaagacgggggccctgggaagcccaggcaggctgaggtgccggggaagcatctgctgaaacagctgtggctccgctcctccaagcccccaaggacaggtcagtctgaatgtgcttctcaggaatttccagcagccccatccaggggcctcacagcaaggctccctacctccatgcgggccttgtagaagtccacgtcgtgcagcttctccttgcagcgggtcagctccagctccagcctctccacgcggttcgccttctcccgcagggaatccagctcgtctcgataggcacgagcagaccgggcgtctgccgctagctggatgttctgcaaggtggacaaaggcaggagaacctagcttagggcatcctctaggaagggcagaaaggccattgcccttctgcatggtgtctccacgacggcccaggacaagccagctcctggtggccgggggcctccatgtgccaccaccacacgggatctccacctgctgtcactaagaaacagggtcatccccatagccgtgctcaggacaagtggctcttgtgtggcttaaaagcgctgctgttgagctcctgaccctccaggccccgttactggacactccagccctgctacccccaggacacacaggctcaggcccccgactcacctcctgcttaactttctgcagttccagcaccagctggtccacctcatgtctggtgtccacaagctgctctgtcttatcctccctgcagaggcagtaaggagaaagagtgtgggaggcagcttcctcaacaagcagccctgggagcaggctgccacttcctaaaacctgtgggaaaaggaaaggactcgggatttgggcggtggggaggcgatctgcttatggggcctgcaaaaatgttactgactcaaaattcttttcttttcataagtttgcaacaccggcccttaaactatgtccatccgccactcaggtctccctccctgtgtgtggggcaggtaaggagaccccagcggcagctgtaccaccccacagccaggctccacaggtgacatccatcagctgcaggaaacctgggagaacaggctcaccagattggagggaaggaggggcacctcatccctccagccaagaaaacacatcaggtgtggtcgtcccggccccaagctggagctgagcgtggactggaggctgcttctgtggacaacttgcaccgtctggacgggaggaaaccctgaagaccgggaagaatccccgcccccatccctgtgcaggcctcagaaggggaggcagctagtccgaggtcaaagagtaagctcagggcagaccccagctgactccggggcacacgtcagagctgtgccattggcagcaccacacatgtgagtcgacaccacaccagaaacatgtctgcaacacacacaaaggtaggagaagcagccggggactcacagctcctgcctgacgcgccgcagcctggccttggtgtcggccagctctacggccaggtgctgcttgtcttcgctagagaggctgctggtggggctgggagtggagtcggcgctggaggacttgatggggctgggtggatgctgtgcctgcaggtagtcccgttcctgagtgaggtccacgatcagctgcagccgggcagagagggggatggaggagaacaaacggggttaaccagcacaacgcctgagcttgaacagggtgaagaaaccgccaaaagacagatatttcagcggagactaagaaacgaggaggaaggtgggaaaaggctggcatgggttttgaaaagaggtgaaatatttagtgaaacaaaagggagtgtacgaaggaggagggccccaagctccgcgtcctgattccctgtatcctcccacaggcccgaggtgaccatgcactgcaggggccgtaaccagggaaagcacgcacgtcccacccccaccagaacctcagcagcaggaccgaggcgtctaggctgaagatgaagggagaggagatgaaggggcctaagccccttcccaggctgaccgggccaccgacccgcggacgcacctcggtgcactcgtcccgctggtcgatgagcctccgcaggtggagcaccatgctcctcgacagggcctccagctcctccggagccacgtcgggcagctccagccactgcaggtcaaacacgttctcttggttgtgagtcacctgtgggcacacatggcagggcactgcaggggcggcagagacgggcgcccacttccctcacactgcaaacagcatccccttccaatcaaccttactaatccctcagtgacaaatttacggtggccagcaaaagggtgccctacgcaagtgtggccaaacccttcagcagagccctgttcatacgaaccacttctgctttcagaactgggtcagagaggatgctgattttcaaaggggaccagaaagcacgcctcacaattatttccctatagggtcctgggataagatatcttcattggagctacatcaatgtagaacacaaagaaggaaagcttcagggtgagagggtgaggaaagggactgtatgttacttcttaaaatctatgcaaacagcaaaaatattaatcttatgtcagaatgttgtgtacaaagcaatcttgggttgttttctggatctattcataaacagttttcagggaagggtgcatctcattcccacgggccacagaagacagcctctttgtgcccctttcactggccagggaacggagatacacagctctgtctacgtgaaacagcctctcgacgcacacccccggatctgccacaggagacaggatccatttcgagctcttctcctctcaattttggaagaaagataccatagtgctcaggcctcaaaagaggaaaacaaaaacaatgaaatcaggggtatctactctgaaacacacccaaagaagtctttattcaatcaacagagatagagaaaacaaaaaaactcagcttgagcaacctagtaagaccccatctctacaaaaaatttaaaaattagccgggcgaggtggcatgcacctgtggtcccagctacttgggaggctggggcaggaggaccacttgaggccaggagtttgaggttgcagtgagctatgatcacaccacttgtactccagcctgggtgacaggctgtctctaaaaaaaagagaccctgtctctaaaaaaagacaaacccataaaataaaaagcagacagaaccctgtcaacaaaggcccttcaatttctcaaaatttgaagagacaccaccttcttacctctccccaccttaaaaggccgagtttggatacaggtgatctgagaattaggagaaatcttatcccatgattcagagcaccctaagggcacaggattgagaggccggttctaggcctggtccagacccaatgctggggaaactccttggacatctcggggcctctgtaaagggtggtgtggctgggcttcaggggctcagcctggctgcaccacagccacttgctgagcttttattgaaatgcttatgccccctcctccccctgagtctgactcagtgggtctctcatggggcccagcacccaaattttaaaaaagcacccagggaattctgaagcccaggcccaatggccccagccagctgtggaagctggtaggcccagctacagcttctccccaatatcaacccagggagtcctgtgctcagctgcctctgccaatcacacaccagctcctgtgcatgcaaatcttcatgtatttatctcatctgtccaatgacactgactgctgaacccaaatcccctaaggtaattaaagcacacaatgcttattttggaaggagtgtggaagtggaggtcaggaaagtaaatttccacctggataccgccccctagggtgggcggcctccttagctgataccacctttgccaacatcaatggcaaagggccgggaaggtcaggcctcaaaggccaggggctcctcctcctccactccgctgacgctcagtgcagagccctcccggcccctcgctggggggcctgagttggggctgggccaagtctcccaaggcggtctttctgggactcgctggttttgattcccaagtggtgtcagcttgtctctgccatgtcactgacagaagcagagaatctctctattctataaagatcaactgttcaaagcagggtgacatttgccagaatacattttcagggcctgtaaatcaaactctgggcctcaaccagttgacagctcttaaaaatagtctgagtccatataaggcaaaaagaaggagacaaaagatgacttgattgaggtgttttttttttttaatttttatttttaccctcattttattttagctggctgattgatggctatctttccaaatagaatcaatgtgtctgtggtgtctgaaacctaagattagcaaaatcgtaatgggtgatgtattcttcaaacgtttccactcatagagaagttttgcctcccggccaccacaggagcagcagtccacagctgagcccaccacgaggccacgcacctacctcctggatatgggccacgatgccagcctgggtctcaatgtccagctgtttgattctttcaatgaactcctctttcctctcacactgcggagggttacatgtgttaatggaagcgctgttcaagtgagggtgaagctgagtccaccacagccacagaatgacagtttcaaaaggaaccacccaccccgggcttctccttcataactaagaacgctcttgtcctcctaccagccttacactgatgtgtctctagtggttgccaggaccacttacatcagaatcacctggggagcttgttcttaaaactcccatccgtaagcccccacccagattgaaaagaccagggtggaacacagaacgcttcattttaaacaagctctcccggtgattcttaagtacagaaagacgggggacacctggtttaggccagggtggggcaaacttcatgtgtaaaaagccagatggtaaatattttagactctgtgggccatttggcctctgtcacaactactcagctctgtcgctgtagtggcaaaccagccacagacaatatgtaaaggtgggcatgaggctgtgttccaataaaactttatttgagagagggtctcgctgtcacccaggctggagtgcagtggcatgatcatggctcactgcagcctcaaactcctgcactcaagtgatcctctcgcctcagcctcccgagtagccgggactacaggcatgcgccaccacacccagctaatgttttctattttttgtaaagatgaggtctcactatgttgccaaggctggtcttgaactcccgacctcaagcgatcctcccccacctcagcctcccaaagtgctgagattacaggcatgagccactgcactcggcccaataaaactttatttacaaatacaggcagcaagtcagatctggcccacaagctgtagtttgcagatccttgttctagtgattcctacgctggggacgatttgctaatggtaccctggcctgagggatccccatctcgcctcctgcccaaggtgccctggtactagaaacagctgccacgtaaaacaatggccactctcttccaggaacccagcggccttctgtcatattggactgaaaggagcatcctcccacctaagctaagggctcggtcaagtcccgcaaacccaatatgagatggctggggtaggtccctctgctgcagccctgcccaatccctacctggacagcacagcccagcaccagcagcagcaccttcttgatttcctccatgctcttccctagatcaagagagcaacacatttaactcagctcaactgctgatataatttcagtgacatgtttaccgtagggaaaaaacagataaaaaaaaatcatctctctactctgtgacattcacttaggtatacacactccatcgatcttccatgtgtggctttatttactttttattttattttgagacagggtctcactctgtcacccaggctggagtgcagtggcaggcccacagctcattgcagccttgacctcccaaggctcaagcgatcctctcacctcagcctccctagtagctgggactacagacacataccaccatgcccagctaatttttgtatttgttgaagagatgggtttttgccatgttgcctaggctggtctcaaactcctggactcaagtgatccgcccacctcagcctcccaggttgcaggaattacaggtgtgagccaccatacccagccttatttactttttaaaccaaatgagaattctgtacataactatttgaagccccttccattcaaatatgtcgtaagtatctccccatgataattaacaaaccataacatcagcatccctttttagcgcgtaagcaaagtacacaatgggagagaacaactcccacaggaaatactgagtcaacgctaaaataaggctgtatacaaccttcccctttttattatgcaaaattccaaacagacacgggaggacagtataatgaacctccacaatacactcagcctcacattatcaacattctgcacctctcactctacctgcctcctccttcccccttttaagtttgtttggctggagtattctaaagtaaattctataagataacataaagccatccttttttttttttttgagatggagtctcgctctgtcgcccaggcttgagtgcagtggtgcaatctcggctcactgcaagctctgcctcctgggttcatgccattctcctgcctcagcctcccgagtagctgggactacaggcggccaccaccgcgcccagctaattttttgtatttttagtagagatggggtttcaccgtggtctcaatctcctgacctcgtgatccgcccacctcagcctcccaaagtgctgggattacaggcttgagccaccgcgcccggccccttttttttttttctgatacaggttcccactctattgcccaggttggggtatagtggtgcaatcatagctcgctgcagcttccacctcctgggttcaagtgatccttccacctcagcctcccgagtagctagactacaggtgcgcatcaccacacctggctaacttttgtattttttgtagacagggtctcataatattgcccaggttggtcttgaactcctgggctcaagcgatcctcctgcctcagccttccaaagtgttgggatcacacgtgtgagccactgcacctttttgatggttgcatacttactttgtaaatcaaggccagtaacttatttaaccaataccccttccagaggttcaatttatatatatatatatatatatatattttttttttttttttttttgagacagagtctcactctgtcacccaggctggagtgcagtggcacaattttggctcacttccacctctgtctcctgggttcaagcgattctcctgcctcagcctcccaaggagctgggattacaggcgctcgccaccacgctctgctatttttgaatttttagtagagacgggggtttcaccatgttggcctggctggtcttgaactcctgacctcgtgatctgctcgcctcggcctcccaaagtgctgggattacagacgtgagcagccgtgcccggccttaaaatatttcaatctaaacaatgttataaagaatatcatggtagctaattctttatgcattccctttttaagcttttcatattgacaaactgccctgcagacaggctctgccatttcaccctgggaaatgtgtggtgattcccattttcctacccttgatcaacatttacctcaccactttcccaactttgtcaatcaggccaaaaatcctgtttcgtcattctgagctgtgtctctttgattgtgcttggggctgaatgcatcttcacctgtttatctatctcaaacacttaaacagcagcagaacacctgcgcctagacgatgggcttggtcacccaggaactgtgtgtcccagacaagccatactctgtctccaagcctcagtttccacatctataaaatggcctgggtaatgtgcagggttccctttcaggttcaaaaaaaaaaaaatctatgtgttctttttcgttatatcctattgtattgaggaagaaaggacatgccagaaatagctttcttctcttaaaagacttaaccaactcacacactgggctacagtgtcccaaagtgtcaaagactgccgggatgaaaaaaccaaaccgccgtcctgagaaccaatgctgcggttcatttcagatccctgggtataagtagtgaatgaatatgcgacctcctcctaagacccctcaactgagaaatagctaaaattggctttccttgagataatgacatcattgtcaagcctcagaactgggaactgggggttcactgaaccagaaacacaccccgccccccagcctgaaggcagggcagggagagactggtgggttggaccacagggtctaaggccactttcctgctctggaggacacacctgagaataaggctcagcgttgcaaagcaatcttctaaggttaaatccttctcctgctagtaagtgtagaaattcatcaatatttgaaatggaaaaattctcaaaatcttaggattttttttttttacttgagatcttttatttggcccaagatactctaatccatagaataaatatcaccacagtgactcacttccctattaacgtggagctattcatcagccacttaattttagtttcgataaagagaaaaggggctgggcacagtggctcatgcctgtaatcctagcactttgggaggccaaggtgggaggtgaggtcaggagttcgaaaccagcctggccaacatggtgaaacctcgactctaccaaaggtacaaaaattagctgggcgtggtggcacgcgtctgtaatcccagctgcttgggaggttgaggcaggagaatcacttgaacccaggaggcggaggttgcagtgagctgaaattgctccactgcactccagccttggcgacaaaggaagactctgtctcaaaaaaagagagagaaaagggaatgcccacatgagtgttaacaaagcctccaatcagtctttctgacagtgcttgccggctcagcccaagtcacccacctccccctttcccttttgtcggcccacagatcactggcaagtgctcatcacatgcccatgctggatataagaggcacagacccttcccagccgtcactggcttgtcttcctacaatgagactcactttttgaaaggccactcacctggtactgtacccaccacaggagctgaaacactaagaaagcacttaagggcctgagatcagcccaaacagaagtcagggtttgcacagaaaatctttatgtactctattcgcagcaaagtccccaaataaactaattacatcacactgtagaatcatttggacaactctggtgatccatttccccagcccaaagcacattacaacagcaaattaaaagggaggaaagtgctagagaggctcactgatggtgttctgagagcaaggaagagaccagaaaccttgcacacacactagagggctcaaaactacactctgaggccgggtgaactcaaacaaatttacaagaaaaaaacaaacaaccccatcaaaaagtgggtgaaggacatgaacagacacttctcaaaagaagacatttatgcagccaaaaaacacatgaaaaaatgctcaccatcactggccatcagagaaatgcaaatcaaaaccacaatgagataccatctcacaccagttagaatggcgatcattaaaaagtcaggaaacaacaggtgctggagaggatgtggagaaacaggaacacttttacactgttggtgggactgtaaaccagttcaacccttgtggaagtcagtgtggcgattcctcagggatctagaactagaaataccatttgacccagccatcccattactgggtatatacccaaaggattataaatcatgctgctataaagacacatgcacacgtacgtttatagtggcactattcacaatagcaaagacttggaaccaacctaaatgtccaacaaccatagactggataaagaaaatgtggcacatatacaccatggaatactatgcagccataaaaaatggtgagtttttgagatggagtctcgctctgtcacccaggctagagtgcagtggtgcaagctcagctcactgcaacctctgcctcctgggttcaagcgattctcctgcctcagcctcccgagtagctgggattacaggcgcacaccaccatgcccagccaatttttgtattttcattagagatggggtttcaccatgttggccaggcttgtctcaaactcctgacctcaagtgatctgcttgccttggcctcccaaagtgctgggattacaggtgtgagccactgcgcccagccaagaccctatctctattaaaaaaaaaaaaaaaaaaaaattagcctggcctggtggtgcactatttgggaggctgaggtaggaggatcgcctgagcctgggagggtgaagctgcagtgagctttgattgtgccactgcactgtagcctgggcgacagagcaagaccctgtctccaaaacaaacaaataaacaaaaaacaccacaaaaacaaacaacactccgaggctgtttggtgacagagcaaacggttctactctctcagcaccctgcaatcacacacaatgacaaccctgagttcattcattccctcattcatcccaacacccattagacatcaagaaaacaatctgacccacagcacaggttagaagagtatggattcctgtttgctaaggtttgtaacaggagggaaaaaggctttaaaggtagagaattaagtttagaaaaatattcatgaaaaaaataaactctttggtgatgaacaggttactaagaaattcacctctgccctcattcaaatgaagcagagtgatgcttgctctcaccaggctgagtgaatagaaacatttgcttattaacaaaaacatcctgtgatccccacccctacagattcctacaaaatttttttttaaaaagcgcccagggcgggaagcagaagtttcctcatttctcatgagaagccgatgcccaatttctttcaggatttcagtcataagaaaaaccgctatttccataaatctaccagattgtgggttttgaatagtttcaaaacacagcagaagattccctcctgggtccttgccagtaagactggctcagtgacacagtcaagcaggccaagatcaaacaaacctacagacagctccctgccaagtacctactatgtgctgggagccaaaccagcaatcagaaagctgataaatgctatgggaacccgggaaaggaacttctaatttgcagcaaggcccagggcaaggactctaaagggaataacctttgagctgagttccacagataaggaggagacagacttatcgggtaggcaagtgtgggctttccaggcccagggaacagcacatgcgaaggccaagaggtaagagagcacgctgcttgtcaaagtataagtgctttatggttacacttactcgagctgctgttcagagggagaaacgggggcaggttataaaacgacgtgaatttctacaccaaaaaagtcacaagcaaccactgcgggcggggatcgagaaacatcagaccggacacactccacacttaacacaactacactctgttgagaataggagaacccctgggggaatcccaggacggcctgagtcaatagctgagtctaagaaaaaccttaccttactacctgcttcctggagtcttgacacaaagaaattcaccccagcctttcttagcagaaatgcaatgcaggcaggccaacataagctatatagaaagctgcagacgttaacagtcataagcttccaaaacaaaagggaaactgcctgatagcacacgtttctaagggcagaggtgaggatagaaaagtagttgcacaattaaaatacaccatcctctaaaatgtgcattatatcaaggtttgaaaattccccgacttgctaactctgagtccatggcagacatgattagtcaatcacagcactttctgacttagggtggaactaggcctcagaatccttctgaacacagccctccacagactaccagttaatggaagttaacacatggaacaaaacctatcttccttccatgactggtacataatgtgtatagtcctttttgactccactctggttctttaagctgtagtcatgcacatgttcagaagacacttttttttttttttggagacagagtctcactctgtcacccaggttggagtgcagtggcacaatttcggctcactgcaaactccgcctcccgggttcaagagattctcctgcctcggcctcccaagtagctgggactacaggcacccaccaccacgcctggctaatttttgtattttttagtagagacagggtttcaccatgttggccaggctggtcttgagctcctgacctcaagtgattcatccgtcttggcctcccaaagtgccgggattacaggtgtgagccaccatgcccagacagaagacactttctgatttctggatacaggaactaattcttgttgtgtataaacaatgactgaggtgtgaagctggggatttaagcaatggcaggcaagcatccctttcccttcctgccccaaactgcacactctctgcccttgctggggtcaaaggcacagtgatgtctctccacagacgaacaggggtcagagataaagcagtgaaactgattcctctgtcttgctaactcagctccccacaaccacagaggcccaggacctgcaaatgaccagccaggctcagggtttaaccctcacaacctggaaggactgaccatattccatagagtaattctgcccttccctcctacagaccaccattactgcaccttaatatacggcatgctaccatgtgacttaattctaaaagcaatcccccgaggacggcatgatgactccatctcagaaatagaaggatgcagctcagaaaggctgagtcacagaactaagatctgtccccgggtccaccactacctaccatctcctaacttatttatgtttccttccaaagcagggagctatgtggtttcgcttctgatcccggtggtcccacgcaggttgtttaaccagcgtttgctgactgagtgaggttaactgttagcatcaagtacctgggttagaaccgcaaagagagcagtttcagtttctctcttctacggcacgtatgtgtgcttacttattctacattctcttctcttctggcttacatgctggtgtgaaccactaactgctttccctggttttgtacttaaaaaccagttatttcataaggatgctcacgaggctgtcacagtgatttgaaaacagcagtgcactgaacacgaccctgttgtctctcctcagtacacgggcacaccccaacactcactcacatgggcacggctctgagggccctcctgagggctcagcttacaacgagaagagctgtttattattattttaacagttggggtacttcctaggcactgccgaggaatactcaaggtggagagttccccgtgggtgggcacatggggatgctccatcatatgtgtccccacccatggggaaggaggcaggcacctctacgcacgggctcacattctggggagcggcccctgtggaatcctcatgtcaccacgtgcccccaccccccggcattaacataaccaggcacacatatttatcaaacgtggactctggcaggcgctaagctgcatgcctgtgtggaatggtgcaggagcctcccgggggcactctgactagtggccctttactctagtgtctctctgctgcccatgtcaagtcagtcccacccccacagataccccagcaccaccacgcacaacagacgacagctacccccaggtcatgtagaacactttgaaatatcagcccctcggagcaccctcaccccaaaaatgacctcctaccccacctgcctgccacgcctgcagaagctgagagcgaattcatttcccagcaccaaacaactgaagaccagaaaagcagaatcagccacaagcctgcagcttgagactcaagtttgccctgggaaggggcgaggagctagggcaggcaggggacgctctgggaaagggtccctcccaaccaccacgtggaaaactcaaacataaagacctttgacaaatagcatctcttccctcctccgcagacggcggtggccacagagagtagggctgctggaagccatggtgtggctgttgcagccagcggcgttctctgtgtgcctgggccatcgctaggaagtttactaacaaagtctggtctccaggcagatccgcgggtgcttggaggccggcgtgtgggccgcactgtgacgctcggctgggcttggtgtcagccaaactctgcaccttcctaggaaaggaaagcctcggctcctggcttaagtgccccagcaccgcacgtggactggagccctcatttccggatccaacaagcagcacagaagcaaagaagcaggatagaaacggggtagtttaaaacagcatttggttgcttttctgaaccttctctctcaaggatgaaagaggaaattttagaacaatcaaaatgcctgcaagattagctttttcttatttcttccctcccattcaaacgcccaaaacgttttgcaaatatgaaaattatatatatatacacacacacatatacacttatacacaggattagagaattatggccaggagaaataaaataaaaacaacaggggtaggggaaaagaacacaagaatggctcatgaagcctgagtggccgaccctcagcctccacaccacacggtgagcaggcatggagccaggggcaggactgggagggccgcagggccaggaagacagggcttttgatttttaaaagcaccatctctgcagcaggaggactgttcctcacaagccggactctgagcctgtgcctgggttgccaggatggaggtcagtaagcctggggcacacccagccctcacaagttccccggggcccccgaaggaaggcagggctgtgccgtgtgggctacgagagagaggtttccatgggatctgaaaagcactccaaggacacactggcaggagagcaaatcaatactgagagggttaaatattaaattccaaggagtttcaggaggtctgtttcctctggcccatgaatcctaaacctcagctgtcacagaaggcctcctccttgccccaggcttgctgatcctcatgagacttccagcaacttgcactcccctgagctcgttccacctagaacacctttcctcgctttctctgtccgtggcttgcccagatattgcctcctccaggaagccttcctggcctgcccaagcagaactcatcagcccccttgcactggctgtgaagcacattcttgcaccatcttctgtcctagaataaatgtcgcaggactctgtcttcccttcctgcctcaacccagactgggggcttcctgagcagaggcggcctgttcatctcaccagcagaggggagctaaaggaggggcttgggctgagctccttttgtgagcctctggctgaggggcagccagctaagatgaggaaggatgaaaaggtactccagtcttttatttggggaggtcagaagtcgggccttctggcttcctcagccggtgcagtagatagagttctgcactcagctgagaaggaaggtcggtcacagcattttgtgcgcacagaaccttgtctcttcagggtgcttcctctgctgctggaatgcgcaccctctgtaaccatcataagagagagaaaacataggacagagggccaggccgctgaacggcaattaatgaaaccccaaggctcttctcaaaggttccaggggcattcagacaggaccctgtagggtgtgcatatgcagtcgcagcccctccagggcttccaggaatcctgcttggcatttagaatgtaagaaacatcagggcagaccagtgacagtaaccctcttgcttggaaccagtggcttactgtccacaaaagtaaccatctgtgcaatttatggtgtgaaatctgtcttgcgcctatggggacctccatgctgtgtgcctctgaatgagctcctccgctctctgggctgggcttctacacctaaatggctcgttcccttccattctaaatggcttcggtgggatcggccatgtgtaagtctggaaaccactactatacttggatacaaaccctggaagaaaaaacaatgctttcttccagtgcaactgtcctgtgattcatcgcagaaagtaatttgctaacaccctggcttcccgtcagacaaatctagtcttttcttgtgcgtgtggcacagtgacaggcctggctgctgagcaagatgctgagaagccagagctggagggaccccggagctggtctagctccatccagcatcctccctcacagcacagacgtgagctcttgcttctcacaggcttcttgtagaaaacactcaccagtaaccgcgaaagatatttaatagctgtgcagctggcaagatggtgaaggcggttttcagggagtcatctcaggcctaggggagacagacacgtggtactgggcagagaatgaatctcacttgaccctgaccactgacaactggccttcttatctatgagagcaagtgggtaacacctgtcaggggccccagcttgacgggagagcaaagtggagagaggaagagagaaaggtgggccccctgcatggatgctgtatttactgagcacctactacatgccagacactgatctaggcattcgaacgcactgacaacaacaacaaaaaaccccaggattcctgctgtcatgagagcgtgcaccctaacgggggaaaagtatgcaatgccacagaggggaaaaaataagtgaacagtataggctattcacaggtgccaaaagatatggagaagggaaagcagagcagaacaaagaagacagggcgtgtggcaggagagacaggtggggccacactgaacaggggctcacaggaggtgtttacacagctcgctggcagagggaccggcaggtgcacaggccctagtgcccggagcgggctgcaaaatgacagtcggctgacctgaggagtgggctgctcgggctgccatgctgggagcagactgcagggggcagaggtgaggacactgccctggggagcagccaggcggaagcaggggagctggtggtggtgaggagggctgcagaggagagctcggcttctgggggtgcactgagggtagacccgggacaccaggcgacagcgcagacacgggtaagagggaaggataaggatggctgaggggaaacaaggcgaaggacgctctacggcactcaggccccagaagcctgcacaccgcctcactatgggggcaggctcttataagagccgtcatataaaagtgagggcggggttcaagcagggtccagccagagcccaggccgtgctcggagaagcagagactacagcagtgaggcaccagacagaccctcccctccccgggggcgtgggtgcagctgagagtgagctgcaaaaccacagcaccatcagagcagaaatccagagacggtcccagggcagacacagcgtaagggagtgaggagtttgggccgggacgggcagatgctgaggagagatttcaaaagcaattttcagtatacgaagtactgtttcatagttactgcactgtccttgacttccacccaggataggaagagagtgaacacccttctgtctgatgggtgtggggggttaagtgagacatacagaaaaactgtaagttgtggcacctcccttttttaggtcagagaaaggggacaaatgcgtagactctcagggtcttttagtatcattgtgttggggaacagtgggtggaccagatgctctgttgggatctggaatctgggagcttgtgatgctatgtgcccaaaacagaaaagttaccccaaactataaaacgttataaataacagtacagtgttagcatccatcaaaaagagtacaaagcaagcccctcacacacgacggggatagatttagtcaaaaagcacacacatgccccaccccgggcaaccatacaaattaaaaaaacaccaactttgttctttgtttaaaaagaaacgaaaagagcttcacacatctatttttacaatttaaaactgaaaatgctatttcataaatacatccctctgcccctagcactggtgtctgcatcttcctgctggtggatgtccgctgccagcctcctctgctctcagagcaccatgggacccctgtcaaacctactcatccgtgcacccagctccccgtcccccagccctgacacgttgccctctgtgtgcagcctgccgaggccaccgtctagcatgtcagtcagcgaggcccggggccctctgagccctcggtgatgggtagagttattcccgtccttcactttcccagccctcactgtccagtttctccaactccaccttcagagctgggaccagctgatccatgtgggctgattatataccacgggggccccagggacattcaattcacctgtcaacagtctaaaaccagcttcctcttaacattctaaaaactgaattgtggttagggttttacagctttgtatatttatgaaaaaaaatcactgaattatacacttacaatgggtgtgttttatagcatgcaaatgatacctcaataaagctgttaaaaaaaaaaatcagcatccacatctttacagatgtttctgtttggcagcagacctgagatgcggacctatgttctctgcccatggacaatctctgtggtgttgggaggtgcctgatggtagtggggcagagagggcaggcttccagatggtagtggaaggggagacacctgcagggatgagaagagggggagcaccagcaggaaggtgggcaagctatgcaggtaacattggagctaaagggaggggtgagaaaaggcggggagaaggatgcgtttaatattaggttcaaccatatgccatttttataggtcaaaaaagactggatattggcaattgcctacagttaaacctaacccatagatgtccatgtgtgacagatgaagaggctcaggtttgggggcggacagagcaggtttccaatcagcccctctgcttacaggccaactggtcaaggacatggcacccaagccctcggagcctcagttctctccctataaacggaaatgggcgcagccacaccacagaagcacgttttcattcctttaaatacaaattttaattaactaattaaagatggagtcttgcctgtcgtccaggctggagtgcagtggcacaatcacagcttactgcagcctcgacctcctgggcttaagcaatccttctgcctcagcctcctaaagtagctaggactatgagtgcgtgtcaccatgcccggctaacttttttattttttgtagaactagtgtctcgccagcacgctcggtctttcattgcatttgtaacgcacgttcagtgccaagcacagggtgggcgtgctaaggagtggctgtcccctccttttgctcctccactgtctccagggcagacggagtggctgtcccctccttttgctcctccactgtctccagggcagacagaacaacaggactaagctaccgccaacctctacaggcatcactctcatctcctcccgtaaccagccccaaataaactaggaaggtggcagagttctgctcagcaaaacaggctccacttccctgaagttaccagaaatcatgagagtcccccggtccctggagcccagggctgtggccagcatggactgcatctggcgtccccgcccttctctgggggagccatgaaataaagccggaacacacatggccccatggcagagctggcaggggagcagaaccaaaggccccctgctactaacacgggaagtgggggagggcgcttgctgccgggggccaccaggaggaccaggggtggcctctgcagggtctccatgtaaggcggtgagtgcccacaggccagagcactgaagactatcaggggtccagggatgctcttccttctggctcatgcaaaggcggacacctcagccagctggagcccagaaagagcgcccccacggaacaaggaagccgctgctgatgttctcagggcggtggcactaaaagaagactgctctcctaccagctttgtcctcggctggttactcagtgaactcttctaaagtctcaaggccactagctactgtcatacggacaggagaggggatggccaggctgcagtgagaccaggctgaggagacgccaacagaggaagcccgagtcccttttggaaatgtctctaatgtttaggattcacggtttattaccatcctacaggtgtggcttttcctgtgttccttgacccctcacctactccaggaggccccagacctaaggtttcaaaatgatgacaaggtctccatcagaacaagggaagtcctagccagcgagtaactctgtccctggggcctgcgacttctgtccaccagctatgggtgcaggtaaacacacacaggtgaaagggacgcaaggcattactccatttaatgcaccaaggaagttatctgacaggcagagattaagttctgactttctgtaagatgccaggaggacatttaatttggtctttctttttttcattttataattagagatgagatctcactatgttgcccaggctggtcttaaactcttgggctcaagcgatcctcctgcctcggcctcccaaagttttggggttataggagtgagccactgcgctcggcctcattgagtctttcaaactcacactgagcgtcagagactgcggggacctagaacgcgtgcctgccaggagagctgagtccaacagggagacataagacagatcaatgagctccgtcaccgagcatgaacctcgcaggaccccagtgacagatgtcagttctctaaagagattcttactctcttgtctaaggtaccacactccctgatggtgtcagctgattccacacttactgaggaggtgagtccaccagatggtatgactcaggcacctaaacccaaactcatcttcccaggaggaacaaggcggtggcctcactggcctctgcacacacatctgagcggttgggaggcttcattcttttttttttttttttttttttgagacacagtcttgctctgtgcccaggctggagtgcagtggcacaatctcagctcactgcaagctccgggccattctcctgcctcagcctcccgagtagctgggactaccatgcccaactaattctttgtatttttagtagagatggggtttcaccttgttagccaggatggtctcgatctcctgacttcatgatccggccgcctgggcctcccaaagtgctgggattacaggcgtgagccaccgcgcccggcctgggaggcttcattcttaaggaagaaatgtgcccttggctgaatgcctcagggtaatgaacccactctttaaaatctcaccaaaacgatcacgtgttttcactgtgctggcccaagctggcagccggagctcgatggccagcagctgcccaacgccatgcctctggctgggcaccacaggggagaagggagcggctttcactcaccagacagtgggtctctgccaatcatcaaaacattgggcaaattcattacaatcagctgctggagaacttcctgcagaaacaaagggggaaaagataccattaagaaccggaaacaaaaataaagagggattaagtaaattacaagtaatgaagcccccggacgggtgcacagccatcccgtggtgactacgaaggagctaaaatgacagcaaggagcacgtaagatgcaaacaaacacgaaagccaaagcctaactgtatttctgtcttgattgttagcaaataaaaagtatgcctacaagagatttaatggggttatgaaaaaagaaaaagcatatttaaaaaataaaatgaaagctaaagttatgtctgcataggtagagaggtcttggaaaaaaaggcaatagatgacatgctaggacagcagtatgatgtttcttttttaaaagatacccttatttttattgtatggcttgtgcaattaaaaaataaggaggccaggcgcagtggttaatgcctgtagtctcaacgctttgggtggctgaggcaagaggatagcttgaggccaggatttcgagaccaagcctgggcaacatagcaagaccccatcttcacacacacacacacacacacacacacacacacacacactcttaaattagccaggtatagtggtatgtgcctgggatccctgctacttgggaggctgaggtggaacaatcgcttgaacctgggtggtcgaagatacagtgagttatcacaccactgcactccagcctggggaacagatggagatcctgtctccaaaaaagaaaataagaagaagaagaaataaagattaaagagatgctactgagcctttctaatctgatggttcaggatccagcactaagcaggtctttggtacaagttataaatgaggagacttctctcatttatagcatgggcttcctaagcgagggatacatcagagctgctctgcccagcccgaggtggggcacaggcgatgagctgccttcccgccctcacacccgtgggcttggagagaaggcccaggcatcagctatcagtcatgcccgctcgtctgggtacaggctctcctcagcgtgccggctcacagcccagtctaccacttacatccccctaagtatttcttggggcagatcagtcttctgtgcctagatgcaggacgttgttcacaaataaggagattttaaaattccagttctggtggggcacggtggacacgcttgtaatcccagcactttgagaggctgaggtgggaggcttgagcctggagttcaagacaagcctgggcaacacagaaaaaactcggatctacaaaaattaagaatcagctaggtgtggcactgaggccttgtggtcccagctactcgggaggattgcttgagcccaggagttccaggctgcagtgagctatgttgcacgagtgcactccagcctgggtgacgagtaaaaccctgtctataaaaaaaaaaaaaaaaaatccaattttacggaagacaaaaaagagggtgggtttcataactattctacaagtggccactatagaaattcttcaccaagaaagctcctgttaggcctttaaaaatgtgtttctgttaagacacaactagtttcgtaagtcgctctattgcataacatgcggaatctctatatccagtgtgctgctaactagcactcgagaagaagagggggataattacacaacccacatggcccgagtgcgtatctcagaccatctctgagtcagattagaacgggggccgaggccgcatgccaggagaggccagcacctgcagagaacatagaagatggtcttctcgtccctccttattgtctttctatggctcctatccacactgcaggaggggatgttaaaccgtgaggtgtactctactcctgaacacaccaacccccctccactcagtgctggaaatcacatttctccattatccagggtcacatgtcaccgtgtcagcaacggctaatgctttctcaaacatgtctcagctggtaaatatctgtacgtgttggacaatagtgtgagttgtttaacagcctcagccctcctttagggcttgggaaaagtcaatgtgaaaaaattgtctcttaaatgcatgagtttgccaaagggttccaacaccctcgccctaccacccccggcaaaatacaccagtaaaatcagtgaaatctgctttccagctaatttactcagtgaaaggagagtgcccaatgacatgagcctgtccgtcacacagctccctcccagcctcaaaactacactccaggctgggtgcagaggctcacgcctgcaatcctagcactctgggaggccaaggtgggcggatcacctgaggtcaggggttcaagaccagcctggccaacatggtgaaatcctgtctctactaaaaatacaaaaattagccaggcctggtgacgcatgcctgtaacgtcagctatttgggaggctgaggcaggagaattgcttgaacccaggaggcaaaggtcgcagggagccgagatcgcaccactgcactccagcctgggcaacagagcaagattctgtctcaaaaaaaaaaaaaagaaaaaaaagactacgttccagtgttccagtcaacccaaaaaacaaaggtcatcaccagcaaaccagccacaatcccctttccaactcttggctagctttcttctgccatttgtccaagctcagccctgtatcagggtgaacgtgtttataagcgagatgcaatatgtgaaatcatcctgttttgttgttttgttttttgaaataatctgaaggtcactgcaaaaaatgcaaattgttatttttatgtgaatgttaatctaagcaaaacactgctagaaatattgctagaaaatgtatgtgttctccttccaaaacaggatgtttaattttgtctaatcagtactttctagttttcccacaagaaacatgtgtcatttgtgcaattaagaaataacgttttgccgggcgcggtggctcacgcctgtaatcccagcactttgggaggctgaggcaggtggatcatgaagtcaggagatcgagaccatcctggctaacatggtgaaacccgatctctactaaatatacaaaaaataagctgggcgtggtggcgggtgcctgtagtcccagctactcaggaggctgaggcaggagaatggcatgaacccgggaggcggaggttacagtgagccgagattgggccactgcactcaagcctgggtgacagagcgagactccatctcaggaaaaaaaaaaaaaaagaaatcatgttttaggaacagacaatatctttctgagttgttcctttcaaaacaccatggttctcctaagatgtaatcctatggccaaagctactctcgagccattaactggtccccttaaagaaccatcaatcacatttccagcaaaaactggctcagatgccagggctgtccagcaatatacataattgagacacattaatttcaaattttctattagccatctttaaaaaagtaaaaagaaacaggtgaaaatattcaactttaattaagccaatataaccaaaatataatcatttcaacccataattgacataaaaatgtattattttactttttttttttggagagagggggtttcaccatgttgcccaggctagtcttgaactcctggactcaggcaatacccccacctcggccttccaaagtgctaggatcacaggtgtgagtcaccttgcccggcctttgcattctttttccatacactttgaaatcagtgtgtatgttacacttacagcacatcccaattcagatgctaaattttcactggaaatacttgactgtttccagatttcacaaaatctagagttgaaaaagttcatttgttggaggtataatatgcgagattaagaaaaaataataaaaaaaaatttttaagaaagaaaaaatagacttgtattcccaggttgttccaaacacatttaaaagttttcctacaactgaactgagtaccagtttttaaatttaaatgaactaaaataaaaaattcatttccacagtcacactgcggtatctccaggccctgaaggccacatgcgactggtggctactgggccccaacaccaggcctttgccctcccccgcggggaatgtggtggggtgaggggcctctgggctggccctcagtctggcagggacgtgaggaggctgctgacgaggggaccctcccacgtggcatcagaacagaaagccactcacttggaggctgcagctgatgctgtcctgccagggcacctggtcacaccccagccagccacctgtgaggcaggaccacaccaggctggagagtgcaagcccagtggtgctctggacaggcccccacatttgccagtgagccctccttgtgccactctagtctttgcaatggcagaaacaagtgccaaggcaagcttgagggacaagggacacacaccagcctcgctgaggcctctgtcttgtcaccggtccttgtggtctgatggacagggaagaagagggtcaggcttggcacatggccctccaagggaacccccttccgcagagcacatggtaggggtgtggcattgcaatccagggtagattgcactcctccccacttctcctttaggtttgctttcggatcctaaaataagattttgcttttcataaatgacttgcttttcaactgcatcctggaatgactcctcggccaattaaatgctttaaacaaaccaaaagaagtcaatgaacaaagggtcagaggcaggtgcatttgtgttttggatactgcaggggccactggtgtccctaggggttgggggagagcaaggctgaaaagcgctttgtaatctcacaaggggagagggcccacccacctgacaacaccctggcctcaaatctaaaatctaggctcttatcagtcaccccaagggggagggttggggtgggccaggaccccctcaggaagcatttgtcaccccggcaggaaggtggcaggggcagcagttgtgtctgcacacggtgtcaacaagcctccattcccagctcccaacccagatcacaggaagcaaactgaaggtggcccagagcatgctgcatctcaaggcctgtagcggtggctttccaaggtcacaggcgtagagttctaagaacagaaccaaagagaaagctgattctattagaacctgctggggacaaacatcaatgtacttgttgagaaatcgggaccatccccaaaacacaggatacaggtgtcccactccaggcttcataggcaatgaagctctgacaggggaggacgacatcagatcgtagcggcgcctggttagggagtgacgcccatgctgggtggtggggccactgcaaacaagaccagcgtccaggccaatgctgtgacgctaagcacttgtcactgctggctccaggaggccacaggcaccctacggtcccctccagcctaagtgctctcctcctctcctccaactccctcacccctcacccctcacccctcccaggcaggtttcaccttgctggggcttctgccctcctgagaggcaggacagaatgagaggcaggacagaatgagtggcaggcaggtgtctggagcccatgaagcaggtagggaccaggacgggaagggactaggctgggaaggacccaaggaaaggggtctgagcgcctcccttctccacctacggtggcccctcacgccccacatgaccctgtatggctcctggggcttgtagatgaagctcattttctgttttgtccagttgaggccattaaactgttagggggacaggccgcctcattccttttcagccagtctctatctgggacttagaaatggtgcatccactcaaccacgttcgccacgggctcaatgtcttggagaccctgaactgagcctgtgctttcttttgggacctccacccttggtttggcaacaaggtactcagctcaagtaccttaaatgacatccttagccccgctctgagaacaagtatgtagaccccaactctgagtcaaccatctactatgcaatctgtcaaccacagactattaaaggcccaaatcctccccaaaactacaaaaggaagcatgaaagaggtgtgagattagagaacagcactctaacagtcttgctgcaaattaacgctggggaacggttcaggacgctatggccactcatcccatttaggaaggcagcaaagagtgctcaaaggtgtaaaaagatacataattgtatgtacagtaggaaatggatgttgaaaaaagaaaacaaaacctcaaaggaaatatattacactaaaatgacagaattttctttattagagtgattagggcaagagcaagtttccccagcattttctaaatattctgtaaaggttctcacagagaccatatagtcagaggcatctatttaactaggtatttcagctgtgaacatgacagacctacttaaaaaatacacacacacacacacacacacacacacacacacacacacacacacacagggctgggcatggtggttcacgcctgtaatcccagcactttgggaggccaaggcgagcgggtcacctgaggtcaggagttcaagaccagcctggccaacatggcaaagccccatctctactaaaaatacaaaaactagccaggcacagtggcatgtgcctgtaatcccagctacttgggaggctgaggcaggagaattgcttgaacccgggacgcagagattgcagtgagccgagattgcgccactgccctccagcctcggcaacagagcaagacggtctaaaaaaatataaaaataaaaaaaaacaagaaacaaacaaacaaaaaaccatgtatctgtatctatatccatatatctatagccactctttcctctgagacaattcaccaactatccaagatgaggaatgaagtagattgccattttaaataatagccacaaaaagcaagctgcaccttcaagcatcttctcatcaggagaagccaagcctcttgattgggaagaacagatgggagccaggagcacccaaggggtctgtaaccagtgaagggggacggggtcctgggcgaaaggctgactctcagggtataagccctgtgaagacagagcctcagaggtcccagaaaaggcccactcaacacctgaggcaaagtaagggcctcctgaaaagacttaacaacctgccagggccatctcaaccactgtgcctgctccaacaaaaaggtcattttctccgcaggtgggagaaacattacagtcctgggaaagatgcaggtggaaacaccgttctgtgcatgtggcagaggttagcttcagtatccactgaaaacactaggacagttggaccaagaacaatgatttcacgaagaaatgggaagaattatttttctccttctaagtgaaactgaatctcgcagcttgatattttaccaggaaggaagaataaacgctgccgaaagccaagcgtttaggcccacaggatgcccctcatgtggctatgaatgggagctgctaatgcagaataaatgagagggaaatcccagaaaagttaagatgaacgcccagcacaggcattcaggatgaaggtgacgctcacggttgccaaggagaccaagatggtccaaacagcaaagagagccttccacacagccaaagcaaaaccacaaagaatgccgctgttgacccacacacgctaacagtcaagactgaaatagcagaagcatgagtgacgtcggcttcgcaggtgcacccagcacacctctagacaccgtcttccctggtgcccaaagccggggcattttctacacctttaggtctgctctggggttcagatattcagaagacacgtactgtgtacaccttgcagcgagcagagaactctcggcctgtctgggagggaggtagacagtggcagcacagcacagggagtactgccaaactgcccagacaagtctgggaaggcttcccagaggagacagcttctgagctgggctgtagagaatgcttaggagtctgacacgtgagggacagagccaggaaatgtattaactgctaagtgtgggcagcaagtcaacccttcggttaccctgagcatcaaactgaactaccaacactctctgcgcttcccacgagggtgcccttcctcccacagccccattaccaccagattaccacctgccagaccctactcgccctccaaagctcagctaaaacgccccctcctctaggcagccacctgatgccggatgatttttttctcccctgaactcctaatgcttcctcagcccccttctgcggcactttctacactgtgccatgtcaatcaactccccactccgaagtggcaaaaagctgctaatagtgacagttgggaaaattaaatcagaaaatattcctcaaaatatatattgagtacacagtttttaaaaacctcttttgtggaggaggtgtcttctctgtctcttccatgttgacaagggaaccaagatctgaaaacctactgttctgctctatcactgcaatgagggtggtttctctgctaattcctgtgccttgaaacctggaaaatctgacaccatattccttaagattcacagcctgtagctgttaacaaaagttaaaaacatttcagagggaaaaaaagcttcgaatttgttttagaattttccattagaacttgtgtaagtagaagattgaatatagatttttaaaaacattccaaagtgaactggtaatgctggcttgaatataccatgctttccaactgtaaaatcccaaatgcaatagttttatgagcaaactaagcaaaagtaaattaattttaaattcctaaactacagaagtgacttcagacaggaaaggccccacacgtattccagtgttcccaatgtctagtccagtgctctaggaggggtgtcgaaaccctgcatcgatttaacacttccagaaacggcacggtgctggctgtgcttcaggcaggtgggatgctttttgagggcccccaagagaaccctgtagtcaggagggatattccacagatctcctttgcaggtgttggaacgtctacgctcatgccactgattaactctccacaggacacatctcacaacctcttcctggatttggccagaagcagcccctgaatgcacctcaacaacttgatggccaaaacaaaaaccacctgacgacctggcactggcaaccagccaacctcaggccccgttaccagaaacaccagacagtgaagaggttccatctcctttctcctccttcctccctgacattcatgcgaggtggccaggacaagaattatgagcatttccagtgggagggaacagccgcagcacaatgtcgctgatcgtttgccagcagggcctggagcaagaccggggttggaacctcaggcctggagagcttccctcatagacaccatcttcatcacctcatgcccaaagccagagcactttctacagcacaggcccgccccaaaccttcaataacgactcacgacacagcctgtggcccaaccccagccaatcacacccgccaggctggagtgcaatggcgtgatctcggctcactgcaacctccacatcctgggttcaagcaattctcccgcctcagcttccgaagtagctgggattacaggcgcctgccgtcatgtccggctaattttcgtatttttgtaaagatggggtttcatcatgttggccaggctggtcttgaactcctgacctcaggtgatccacccacctcggcctcccaaagtgctgggatcacaggtgtgacccaccatgcccggccaattttcttattttttattcattattatttttcttttttttacctctggaacatagcacattttctaacatagccactgagaggaaaacccaagcagtggtttgtccttgctgcctgcacaaagcccaggcccacatgcttgtaactccatctgcacaagaggctctcctctccacccagtccctcttcggggcggggagtcctggcaaaacgagtggcaatgaagtgcttttatgttacgaggctgtcatgtaaagctgctgatagattcaatccatctgttccacctcatttcgattaatcctgggatccctagggcctgaaaccaactgcaatctgcacaagcccaggagcgccggctcccctaacaaggccacccgtgtctccgtacccagggaccaactcggcccggccgaggctaccacgtcatcagaaaaccccctcccacggaacacttcctaactgcctgtccttgtggctgcattcacagaaacaaacataagtcggttctttgttcacagaaaggaaaacaaatatttcctttgagctgacccaggaggaggagaaccgctgggaaggagcacctggaaactcaaacaccgcagcatgagggcagagccgctaactcctgcctctgcctgtaacctactgtgtggcctcaggcaagtcacagtccctctctgagccacaccctcatctgtaccaggatcaggactccacagtctctaaaggacttcagtctccttcagaagggggaagggaggggctggaaaaagagacgctgctggcaagagaggcacagcacatctttatggcgttaactcggctgccagctctcaccagcaggcaagtgcccacgcgtccagaagaactcagggaacccggcagggagggaaccagaggatgtttcaagtaaccccaggagctcctgccaccttccctttagggctgggtgatgccctggattgctctgtgggcagacctgtcttatctgatgccaggaagggcctgttctgagcccctgagccaaagaagggggcggggggcagccccagaaacacgggcaggacacggcattcgactccttggaagagaacctctgcccataaacagtagttcaggaaccattttacaagaggaatgcaagccgggtctctgcatcgggctttaggaacgacctgctgcagtgatgcctcggcaaccacaggtgcggatggtgggggaggggaaggcgggtcagtaggtggacacatccgtgcatacagaccccaacagcagagggatgctgagaatctgcattttaaaaccaaaagagccatcaagattatccatagagtcaggaaactgaggtccggagcaaaaaatgacagaggcgtagccccacattcaggtctggaaacccaggtctccttgcactccgccctagggctccttatgccataccaagaagcttgtatccactcagcggtgtctgctgagtgcatgccatgccctgaggtgtgtgtttggggtgaggcagaaggacttcaaggattaggctaaggatggagagagcaggaccctttccccacaggacagcacctgcagcagttctgggctgccctttcctctgtccctaagtccacccctcctggctaaaacgacagcatcggtgctccagtgcttggagttgatataagggccctgattttatggccgtgagggatcgtatgactgtgacttcatggtggtagagtactttttttttttaagcttcttggcaaagtcagtatttttgctgatggatggaaaagtcagtagttctgctgatggataagcaagaaaggggcagagaaagtgtggccagaggaaactacggtatgcatgcagggtgggctgggacaggcatgacccccccagccagaatgagtgtagtggtcccatgggaggagccatgtgctgtccaggcccagccaacctcacccgccggtggcaggagtacagaggccggcggtggcaggagtacagcacagaccaagaccacagtcttggtcccgaggagcctgtggagtcacagactgggaccaagactgcctcccacaccctccagtcaggggtggctctagctgatttcctgggcaggcacctatctgtcctgggcacaccctccctagctcagcagaagcaaggccttcctcgtcccagcaagtagctgggctgggggaacgtggcgcctgcccacacagtgtcccatgtcccactccaccgctcacccacccaggcccacaggcacctatgccagggcagggctggggccacgccacaccctggcagccctcacccggtggcctgacaatgccgcttcactcccaggcacaagtcggagcaggatggtggagggcacctaggagcctccagcggtagatggcagcccagaccaccccagcctgctgggacctgtgagggtgggaaaggcaggcagtgggggcagccagcccccaacctcacgccccaacctgagcccaggcctcagggtacgagcaccacagcacaaggggtaccagcactcccgagtgaccaggcctccttgtccagtgtcccagggcaggcatctggagggcagggagagctccttgaggaagggcagccattccctctctcatttatgccacacttcccgggcacctgctgggtgtctgatggcatgccagttgggaggtggagggtatgaagccaagactgctaccctcaaagccaggaaacaaagacaaggaggacaaagcctgtgggatgggggacagtgaggggcccagggtgtttgctatagggccaggccctgtcctggggagctcacagcctgatcccaccagcaaatcccaccagcaagtctggcaccctaacagagggatggcaggcacctgagctgggggcactgggagcagaggagagcggggaatccagaaaagctccaagaaggaggtggccggaagctgaaatgggaaagaacaaggagcaggtgacatccaggtagatggcagtggtgcgggggggggcgggcgggggggggaggcgtgtgttagtgcagggagggctaggaataaaggaaaaggaagacacagaaggtgcccccatcttgtgtctctggctacagtcccacgatgaaggacaactgagaaccagatgtgcacagaaccaccgttcagggagtctggacccagccctgtctgcacgttatctaaacggtgacagcagcagctttggagtcccctctgccggctccaccaccacgttgctgctgggcctcggcatcaagccctgccaggtggccagaaaggcaggtggccgggcaggcaggcatcacttaacctagcgacaatcaagcctgtgcctggcatgaagtcaggcccccggaggtgctggctgaacctgaggcctttcctagccgtcaggttttgctgggcactgtgctctcaacatgctccggggcgacacaccatcctccctcctgcttcaacacagggcagctctgcagggggcaaacacaggaagccacagtcaccacagtgagcccataaaggaagacagtcccagctacctgtgtgtgcgaggagtggggtccattctagagatccccaggaatgcacaaaccgtccccagcccctgggctcaggaccaaggaggaagaactgagctgggacatctgctggggccaccttctctcttctccctctggcctcaggagggccaagaaaaacacacacgataccagtgccctatggtggtctggactcaagagagctggcttggacgctatgctgagaacactaggggcaggtctggccctgggagcaagtgtgccacggttcatcagtgacatctgcctggggccaagcagaacttgtgctggtcaaatagcaaaggatgaagagaaggaaaaattctacacacatgggaaccatgagtctccagcatggataaataagactgtaattacccctccttagcccccactcgctcctccaaaaaagctttctggaggaaacagacagcagagcagacatttcatgcaaactggtctcttttcattacaggagtttgcagcaaaagatcagacttcatctagagagcaagaaactctctattctatcaccaagaatgtattctatagcaggaaactgggggagggcatatcgggacacagttgaaaagccggggaggaggaaggttcagaagtgacaagtttctaatgactaatatctcggcaggaagtgaaaatctcaaaagatgttatcaactttgcagcagctgtccaagttggggggtgggcaggggttggaggtgacctggcagcccagccggtcccctgcccacccgcacctgacaaaatcctctctgtccagccacacttgcctccaatgccttcctcaaacccctccgccggcaatgatcacttcctcagcaatcagtgcccccaggcccctctctcgtgtccctgcctgagtcccacacagggaactgagatcctcagggtccccagggcagatgctggaacatgctcacctctgaatccccccagggctctgcacagtgtggcccacagcagatgcctgccagctgctggctaaatggaactggctgcggggaggaaggctctggtgagaacagaggctttttgggacctccaactaaacgcaccctcccccatctacagtgtaaagaacactttatttcgaacagcaataaatcagcatgctgcataaaccaggagcttggctagacacactgtgtctattacctctcatcctaactcttgcaggcagtagcagggttaagtccaccaggtatctgctaatgcaaggtccatttgatcaataggtatttttcattgcttggaatattggagtaaatgagagggctaaagaggtaaatatatgtcacatgtgtgtgttaagaagcaaaataaaggaacataggaggaagtgacagaaaacatagctcttacagacaggtggtcaaagagggccctcgatgaatcgtcagctgaacaaaatgcgagtgtagggagggtgtgagccaggtggacgggtggaactggagaatcccaggcagagggaacagccaggggcaaggggttacagccagaacaggccgtgcagtcctgctgagcacagagcctggggtggcccaaccgacctttgaggccattccaacagtctggcagcatctgcagtggtctctgcagtcaggctcattccgaagcctcaggaggcacaaggaagtctcacacaagtaactcactgtgatcccaggggtagtttaagcttgggttccaggcacagatgactggtagtggttacctagagttctgtgttgagaaggattctgaggccagatctgggctcagagacaaagagggccaagatcggtcaatggtgcctgtcagagccaggaatgaagatgtggtgacactcccttacggagcccaatgggacaggcactgtaacacgtatgtggtatacaacatgccgaggggatgtgggcaaaacaccaggaactctcttcactagttacgaagctacagactgagtttcctctgctaaaccagccttactcttcgagtctccttcttgggctgtgggctcctgagggtggtgatctgggcggtctcgctccccagggctctcccagggcctggcacacagcagggctcagccatcatttgccaaatgagctaatgaagggccacaggccccagggttagcatgcgcgcgtgtctgtgtgtgtgtgtgcgcgcgcgcatgtgggagagagagagacaggctgtgtgaacagcctgaatctaaaggactgggacagaaacaatgcccttcaattagaccaactggacccctgctgtgtgaggctccgacctgaggactccaaaaaaaatcaaatcagatgaagcttattcttccttttttcctttaagtagggaagcttttcttcagatgtgggtgaggtggggaagaggggggtgggcagcggaatcaaagagcgttttcggggaaggagggaagggcaggcgcacagacccgccccggcacctgctcacgaggcagaccagctgctctggcttccccgcagggccggccgagagcccacacttcaggcaaataaaagcaccctcaccagctgttcccatggccaagccaagcaggatggcagtctgtgccagccctgcctcggcagcaagtggactcttccagcccaagccacgagatgaggggagactcaaccctgtccgtgcccggagcaccttccctgtgcgaggctcctcagggcgagtggggggcaaatgtctccttctgatctgaccctttccagcaggcatgcatcttcttgcgttcaatggggcaggtgccgtaactgtgcccattttacagaggaataaactgagatacagacagtaaggatgtgccctggggtcacatgactacaagtggcgaggctggggctggaaacgtagaccttccagccccgcgagttcacaggagaagaggcttgaacccagtcagccaacagccagcagcccaaatgtatctgcggaggagacctgaggagctggcaggcgcagaggaccctttaggctgtggcagccaggaaaggccacacttgtcactcccgctgctgccccccaggacagggtgacgatcataggtcaggcttctctcctgtgagctcagagcctcctgaaacacccaggtgctcgtcgccgggcatatgcatgtctggctggtggtgggggcgctgtctgctcctgctccctgaccttggtcgccatcttctgcgctttgcacactcatgactgcctcgattttatatccactcatgtgttcattcactcacccaacaagcgtttagtgagcccccgtcccctcaaggcatgtgctaggagccagggcgttatagtgaatggaaacagataggacccctgccccccaggaaccacagtcaaggtagtgagggacttttatccaccgccgtctctggagagcccacaggtgggaacacagccctggtggggcacagggaggctctaaacaaacatttcctgcatgaacgcagaggtgagaaggaatgccgggaagcctgcagctgggcatcctgagagccacctggcagcagaggcagagagcagagatgcggaagagtggctggtgctgtctgtggggaggcccaggggtcccctggatggtgccctcccatgggggccacgcacccccaggtaagcccagtgtcggttcagcccccagctggctgcccacgacacccaggcctgccgaggtaggaaaggatgtctgtctctcagtcacactgccgagcccctgaggttaatatcccaaagtgactgccacagccccggccacccagacctgggaaagtggggctggccccaggacatcgtgaagaactgctccgggtgggcagaccagccactccacacccacccgagcaaagctgcctgcccgccccccctccctaaccaactgccacaaagtggctctcaccctgtgtccactgagacactggtcttgaagaaaggagaaaaaacaaagagaaacagaaaccatgaaaaagcacccccacctgaacaaacaagctcatcccacctcagactgcctgccctgagcttttctcaggaggagggggtggcagtggccactgagggctggcagcatcagttgccagggacagggcatgggtgccacgcgagcccttccacccattcctgtgtggcaggctgagacatgagcttactcttccaccgcggagctcccagcctgaggcctgctgtgaagatgacagttcacgcgcatgagagccggagcgatggtgctgaactgctgacgatctatgccacttagctctgaggtcggcaggcgcggttattcactccctgaaccagcgagcaagtggagttcagggggttaagggatgcaccccggccacccgagcatgggacgcatcatgggactcgtcgtcagttcttgagagtccagatctcttgctaaatgcagatggcccccccccggtgccacttcaaggttctgacttttttaacccacaggattcacagtataatcattatgtacccagaagtgctaagaaccatggtggggagggttacaagatgcacccctgagaattatgttcatctgtgagtaacaaagaccttaaaaattgtgacttacacaagattgaagtttctcaggagacaggcagcccaaagctgctatacgagccccccagtgctgggtgtcagggaccagtctctgtctggttgcccctctgtggggactggacctccagccattacgctgcagtgcgtgcagcaggaaggaggaagggggaagggaggcgcgctgcctcctccttctaggaaggcttcccaggagcacacgacgctgctccatacatgccatgcagccacatggcactgcctagctgaggggagactgggggttctttaagtaaggaagaagaggagagtggtacagaattgggcagaaatctgccacattagaggagataaaacatgacctctggccctgtggagattaccagctcattaaaagacacacgcacatgtggaaatgattagtgggtgaggccatctataacaaggcaataattgtgtgacacagataggaaacagtagttgaggaagtgcaaagccgcaagctggcagaggtcactacagccagcaggcatcctgaagtggggaggcctgagctggagggacagggggtgacaagagaagcaggggaaagagtaactggaaaagcagactccaccccctcccccagtgaacgccaggccatcacagcctcagctaaaccagcttggggcccggggagcgctgggcctgacatgcagggaactgggttaattgttcatggcagtccttggctcgggacactcatctttggtttgcacatggcccacttccacttagtcacttttcacaatgtaataaccacctgcacacccaccagctgaaacaaaggctagggccttgacaataacctacagccaaccagatggcgcccccagcacactgccacctcctgccacccaagacaccaaaaacggaatgagaagtacacattcccatgctcttttttatgtagttttattgcacctgtaaattttcctagagagtacagtcattgtagttgcttttaactttatttttaaaaggcatagtgctgtaagtcatcattgggaacatgctatttttactaatatttatgatattgccagaatccacctacatcactgaagttatgctgcagttaatgtgtttggacagctgtataatattccattgtgtgatcgtgtcttcgtgtattcatcccttctcccactgatgggcatctgggtggcttccaggtttctgttattgtgtgcagaagggctgtaaagtcccaggcatccatgtgcagaagttactccgggatacccttaggagagaaatcagctgggccacagtacggtgtgtggatgtggaactttaggctttactgccggagagtttttccaaagtcagcacagcaatttgcattcccaccagcagctgaggaaaagcagaacagcaaaaacttgcgacacactggaggcccacgagagttctgatcccttctctgacccctcatgttactggtcccttgacagggagcaaacagacgcactatgacccagcatcacaaactaatgtgtggaaaggctgggtcttatccccgagccaacctgactcaaaccccaagctcctggcaccaacgcctcccatgcctcagggcaagaagccacagggggaggcagctctgagaggcagaggatgaggttgcagtcagaggatcacatcaagatggacacctccagagggtcaagttcacggtcaagggctgaaatgcagacactcccagacctgtgtgtacaggatgtggccttggccacccggggcagctaggaactgggcccacacatgtgctgttgcaaggtcttctactccggtgtttctcactccatgtttactgcctgattcaggtgcctccaggggatcacacgagcagaagtgggacgctgacggtgcctcctggggtaggaactccggcctcaagctcaccttcttccactccgccccagcacccattctccttgctggctgtcagtgccactcccagaagagcccacagtgatggccttccatggccaggcctggcagccacaccccgtgcccgggcctcctgcgggggtgtcttgttcactgtccacttccactgggtttgtttgaagccaatgcgaaaactcaaacgctgtgtctgcccgcaagaagtttagttaccggaaaaagggtctatcctgaaaacaggatgagaagattttactaaaggaaaaggcgtttgggggctgaatacaggctcactacggggatatcgaaaggggtaaaactgttgggaactgcgcgagcccaccgtgagaaccaactccacgctgaaggtcctttctccttacaggggtgtctcccttgccagcttccggagcagggtcctgagacagtcagggtccctcccccacctcattcatttcctcatatttgttttcccacatatatgttcaatcaatatttgtctagtaaaaacaaaactcacattactatttatgcaagagtacaaataacctttgtaaaactgttaataataggattcggctatcttggggcggctggacatactgcagcttttcagaaaaccttacataaagcacaccagtgttcagctaggaggcggcagcagcaaagtcccaagaacacagtgctggtgtaggagtcaggcccgcatctctcaataggtaaatcagtttttagaagagcgccaaaaattacatgcaagccaaaaagttgtcattagaattctatacactttaaaaacatttttattgtgaaaagtctcaaatgcaaataaaagcagacagtacaataagcccctgtataccctccaattcaacaacaagcaagattggctccatcttttttccctttgctgtaaagggaaagaattttaaagcaaactccagcatcatgtcattccacttctccatcagaatgtgcctctaaagaatattggcgttttcttacataaccacaattacatgctctgaagttgtttttttttcccctatgtgcctcttaaaatgaaggcctctgtatgtgtttggaggccagcccagaagtaggagacagagggaaggggcgggggagaccatggagagagaactgtgttggtggaagctgcagtccccagggagcgtttgtgatttgcacgccccgtatcctccctgtagtcctcccttctgtgactataaccactaaccaccagccaaggagaatgggaacttggaaggctgacaacgtggcccaccaatccggtaagggtgtaatagcattgctggtggaaaaatttaagtaactcttctaagtgccaaactgatgccccttcctgcaagaaaaatggaccacaaacagggctgtgaagcagtgtgtgccctggtccaccctctgtttaacccactgaaagccactggtcccattacaggaaaggttacctccatcactcaggggctcccagagaagcacctgtgggtgggcagaactgaaaggtgtggggctttcccggtacggtctgagtctcctgtcccccagcttgtcctctgaaggagactgtgacccaccagacccctcacacatgcccgtgagggggtcaaactccaaatctcaaacaacctgtgcacagggtactggggacacagatgtgaccaaccagcccgcaaacttggggaggaattttttgggtttaggatgtgatcttctctatattctctatgcccacgaaagttgcatcctcttcctgctactgaagaaaaatgctttaaaacttgacccaagaagagagcaggcagcaacactttctgccccaggtggcccctgcaggggactgcagactgtcttccattcaagccgggccttttggccgggtgcggtggctcatgcctgtaatcctagcactttgggaggccaagttgggtggatcaattgaagtcaggagttcgagaccaccctggccaacttggtgaaaccccgtctctactaaaaatacaaacaattatctgggcatggtggcgcgtgcatgtaattccaggtacttgggaggctgaggcaggagaatcgcttgaacccaggaggcagaggttgcggtgagccaagatcgtgccagccagggcaacggagcaagactctgtctcgaaaaacaaaaacaacaaaaaaccggccctttcttgcgagactcagctcactcctctctccagtccgagcccacctccctgcctccttcttgatgccttccacggtgtattttctgaacagcccattttatcacgacatcttgtcttcattgtttcacactttgactcatcctctactaggataggttctgtaatgtcagggaagtagaaagagcactgggttggatctcagcagccttaggtttaagtttcagacccgccattaaatacagagacaagtcacaatttctctgggccctggttttctcatctgtaagatgagagatagcaaacactgtgtatggagcgctactgtccacctcctgcccccacagcagacatcactaattgatgaagcactcttttccacaaatctcaacgcagaggcctcataatccttctcaacacagccctctgggcagccacaaccaatcaactcaagattaaacctatctgccactccctggaccaggtggtttccagagaccctttcaacatggcgggccccatgacacagcaccttggagattatgcaaaacatgagaacacaatctttccccagcttatctggactctaaattggccttctttgtcaggaataacagaccctgaaaggttcttcaaagtcaggtccctaagaaagctgttccatctccagctcagcgtgtttccctttgttctacaggacatgggtcctacagacaccatctagcaggtgaggcagagatgacccagagaagacggagaaatacacaaccaccaaagctggggatgaaattaaatctgacctcagcccaagaagtaggtacaggcatgcatagatgctcccaaggactacctggcctcctacagaaaattcaagggacgaccttgtctgcttggatttttggcacagactcaagcgaacactccaaacccaggctacgcacccgctttaaaattctctgctttatctcctgcaatataaagactagggcctctcagggcccaggtgtcatctgattgtgcctctttaacaaccagtgtcacaggccccggaaatctgaaaagccctgggctgtgaccctcatcctacttacccaggaggctacaaagcaggggcctgtcagtcactatccctccttccatcctccaactctggggttgctcctgcctcccgcaaagcctcatcttaaagccagatcctactgaaggaccccagggctccagtgcaccccttcccagcaccttccagcccagtgccttcctgcatcactgcagcctccagctttcttatagagccctattctcctcaccatctgtagacttggagctggggaagctgcttctcaaaggtaagagagtcaccccctcgaaccctggctctgccaggcctggagtgcccagggcaatccgttccacagaacggctcatctcccaaggagactgcccaaagcccaggctggccatgctgccgtggggggcccagccaggaatctcagggggccatgaacagaacccccaagaaagactgtcgttgtttccaccaaacaccactactttgatcaaggcctcctccccagcaccaaggaatgagaaagcccctccctctttctgcttgggcactcagatgtccgggagccaggaggaagggggtggagaaagtggggagccagggacactctgcctcctcggaggtcgccaggcacttattaaactgtctcatccttgctggctgaggatactccacgaggtatcggtttactttgcaaaaccagttcttgctgcttaatagtgtggggaccggatgaatggccagttggaaaccagacacccctgggaacagccccattcctggggaaagcaagcactgggaaaagacacaaggactcccgcaggtcacaaaccattttattacccacattgtgctgtgacagggaggggtctccaatgaagaggacctagcactggaaggtgatagccccagaagagaagaggcttctttctcactgtgaggcagaaacaaatttatctgtatgtaaacttttccagtaatgggtgatgctgtgacacctgcagaaagcagcctccctctgttactactataaacacccattctgcaggcagtgtgagggcacagccttctggagtgccacacctgggtaccacggcacactggtgcatcccgggaagatgttcctagggcaccacatctgggtaccaagaggactggtgcatccaattagaccgaggtgcaaaagccaatgcgtcaacatccaagccatgaagattatccaaaaactctcaggtggaggctaggcgtggtggctcacatctgtaatcctagcactttgggaggctgaggtgggaggatcgtttgagtctaggagttcgagaccagcctgatcaacatagcgagacccccatctctcttttttttttttttttgtatttgaaatttttattttaggctgcaaaaacaaaaacaagcaaacaaacaacaaataacttgaaaataggcttgtcaaatgatgtaaattcatcctttccagggaagcggaaggtagaccatcctgcttcactgctgcttgcactctgttgggttttgatccttctttgggtcatagtctggatcattttcctcatctcctccttcttccccttcctcatctgcttcttcaccttcttcatcataatcatcaccccatctcttaaaaataataaaccaaaaattctcaggtggaaaaactatgaccttcactattgtgctgcacactacgcactggcaccgggaggaaagggtggccagcctaccccaactgcacacctgggacgcccatcagctgctctctccaacacgtgcggctgctctatggtgcagggccagctggggaaccaggcttgtcaatgtgctgcgaacaagcccagtgtgctgctggactccggatcctggagtcctcccccactcccttcctggccacagacagccccaagggtggatgaagcccacgggtgatgctccaaaccctgaccctcaaatccacagcacgggggtggttcttagggcaccatccacccaacggcaaaggatactacagttcccatcctctaaagatgacaaactttttccttccaaagcacattctccccatgaagaaatgcagtgtgatccctcagatccctggaagccttttctaatgagccacatggtgagaccggcactaccaatccttttctaagacagacaaggtccaccaggacacagcacgctcaggtagttttactttgaggtttgggtgtgctgctctgcaagaccccaaagcacacagagcccacgtggaaagtgtcacccaccggccaggaggtttacctaagaagtctaccaatgaatgccagcccaccgcagccagggccccaacacacctttccatctctaccccagacccagggttctctcaccccacaagtaactttagcacaagaaacgccctcatggcatgtactccccaccacccccaccccatcaggcctcgattctgacagacagcagcaccctgacgcatattacgaaggtgggagcctcctacagcctcagtgagaaggttcccaggaggaggagctaacacagtgccagatgtctcgcagcttgcccagccctgggaggtgagggtttccgtgcccacttggcccacagaaaacctgtgtttggagaagggcctcaggtcacaaggtgggcggcaaggccaaactcggacatcaaaagctggttgcccctctttggtagtccagggtgtgccgaacagggggctagatattccagggttttaaaagcctgcttttgaccaggtgtggtggctcacacctgtaatcctagcactttgggaggccaaggtgggaggactgcttgaaactagaagttccagaccagcctgggcaacatagcaagaccctgcctctttaaaaaaaaaaataattaattaaaactaaaagcctgcttttgtcctgggtggggcacagggcttgctgcctatgacacatctccacctcctaggagaactgtccacatgcatttctatatcagaggccacacagtacagagaaaaacattgggccaggagcagaatggcctgtattccaatttcaggtctgacactcactagccatgtgtgaccctgagcaagccagttaacatcccagggcctcattacctatctgtaaaatggggacaatacttcctgaaccatctacttcacactctttatagatcctgtgatgactgagctctttctatgatgagccaacaatttaaaaagtagagcaggccgggcgcggtggctcacgcttgtaatcccagcactttgggaggccgaggtgggtggatcacttgaggacaggagttcgagaccagcctggccaacatggtgaaaccctgtctctactaaaaatacaaaaaaaaaaaaaaacaaaaacctagctgggcatggtggtgggtgcctgtaatcccagctactcgcgaggctgaggcaggagaatcactcaaacccagaaggcagaggttgcagtgagccaagatcacacctttgcagtccggcccgggaaacaagagtgaaactccatctctaaataaataaataaacaaataaacagtagaggagaccaatggtagaaccgacagggcctgtgcacatctgcgcatgccacacacacacctgccacggtggccatagttcattcgccaccccaatgtgcgaccctgctctggaagctgacagtctccatgctcgggccaatctgtgtgttttctgctcatgcagcttgcatgccaccttttagactttccaccatggccgagcccagtgttggacgtgattgttcaaatgggagggaagccttgtggattccatcttagaggccagcacactttctcctcacgcccagcgccaaaacagccctgggctctgcattcatgggctatgacccaggctagccccactttaggggcttgggaccaactaagtcatctctgccagagaaggtagccaggacccaccacaatgaggtagtactgggcatcctctgtgatgaaatgcaaaagtggtggtaattgttaatatttgtgtactaagcgcccagcaccattctaagtattttaaatatactaacttatttatcctcagtctaatctaaccttgttgtgattcccactttatgaatgtggaaaatgaggcataaagatgcagagtgactcgcccaaagtggaatcagcttttggcgcaactgtccacatccaaaacgcacagcctaacacaaggacttgttctgggaaaagaaaatcaaccacggggctctaaacacacaatgtttacgcaaagataatttaactcctttatagaactgacagtcagtttcaaggggctgagctgtgttactgaacctctcagctccgttcccacaaccacagaacctctacgggttgtcatggagagtgccaacgtccgggccatggaggtttggcgaattggctcagatgacggttacactccgctgcgtcttcttccaaaggcccagtcaggccaagctacctccgcagcatgtgtggcgggaaccacacacgatatagacaaaactgctcccaggaaggcaatgacagttgccgcctataagagctctctttctgttgcccccagatttccaaagccagatggaaactgacaaacctgaactctcttgcctgctgggttaggccctggacaaaggcactaggaggcagactagacaggcctcctcccgtcgctctgaccacaagaagtgcacgggccagctgtcgccactccagggagtttccacaaggctttatgcagccacaggaagattcctggttgatgcctgacagggaaacaaggaaaggagggaaggcagcaccctgagagacaagagccgagatgctgatggcatggacaaaaaccacttaatggcccatgtttcagttttcttgttggctaaacgaggagcagcttgggcaggatcagcagtgcccaaccctggctgcacgtcggaatcacctcagacaacggcttttaaataatactgacagccaagcccacttgggccagttaaatcagaaaccctcactctacaaggggtggggtccagacaatgcattttaagggctccccattggttctgccttgcggctggggattcaggtccctgcaagcttgaacattccactgctgagcgaagccacacaccatcaggacttgctctgaaaccatcccccttagagtcaccatcagcctaaacacagaggagcagttaccacgccccagcgatatccccactgtgctgcggccagcaagcgggagacggccagggtgtgaagggccctaaccaatgtatgaccagatttctgtcatctgtcacacagaagtgagctccagctctgctattaactcaccatgtggcctcagcccaccccccgctccacctcccatgtaaaatgaggggactgggcctcgtggctctaggctgcctcggcccagcttctcaacgttcttgacactgatgctacagcctccaggcctcaggtgctcaaggcccaggcaggtaccaggtagcgcctgttctggaaacgtccagggctaaggtgtctgccatagcaacactagatccctcttttcctgagtgacctgagctatagcagccttgagcagacggtgaccgcgtctgctgcccagagcttaactcagacgctcacagtaagctctcaaactgatgtataaacaagaaacacacacagcgagctgtcagccactcgcaaaacagagaatgacttaaaaaggatcgaaacactcaaacacgtgacatttcaaccaaacacagactgagatccgctctaactgtgggccatgactcaagcacacttgcagcgagggatgtgaacttctccctttggggctggtggaaaggacttccctgggtattaatagccctcagctgtccccacgaaagccacagattcccttccaagggaagggccacaggctccgcagggaaccctgaagcacctgaatgtgctgaggtggcaggatggtgcgtgagtctctgtcttcttcagaccccatcattcatgtgacaaaaacaaaagacagaaaataaagcaccgagggtcctgattctgctcagcctgtcagaatattagtctgcacgccagcccaacatgaggttcaagggaaactgaagtacacagagacactcctgtcccccacctgaatgaggagccaattagttcatctgaagacctgcctggcccttatggcctcagcagctactggtcaagtggagtgggggtagtttacaaaccagggagggacaggtacggtgaggagggaaaatggctccatccaggcttcctccgagtccaaacgttaagagaaaagagggtcatgggccctgacctctgctccatcctcctcctggccttcccggcttccccaggggaaaagtcaacaactgctcttgaagatgtgattccaagttcaaagtcaaggtcactgaccccaaaggtttcaagtagaaagggatgcttccgtgtctgacagtttagtcctgcttgatttaagcatgagcttctaaaaagctttgctatcctaggactatccatcatcaacaggagtaccttggctgctggggcttaagaggaattgctttgatgtggaaaaacctctatgctgactccaagtgaaaaaagatttttggctgggcgtggtggctcacatctgtaatcccagcactttgggaggccgaggcaggaggatcacttgaacccaggagttccagactagcctgggcaacacagcaagaccctggctctatttaaaaaataaaaaaaaaaaaagaaagaaaaagaacgaaagaaagaaaaaaaaagaggagaaaagctttttcttggccaggcgcggtggctcacgcctgtaatcccagcactttgggaggccgaggcgggcggatcacaaggtcaggagatggagaccatcctggctaacacggtgaaaccccatctctactaaaaatacaaaaaattagctgggcgtggtggcgggcgcctgtagtcccagctcctcgggaggctgaggcaggagaatggcgtgaacccgggaggcggagcttgcagtgagccgagattgtgccactgcactccagcctgggcgacagggtgagactctgtttcaaaaaaaaagaaaaagaaaaaggataaaaaaaaaaaagagaaaatataagaaatgctgatgagtcctgctcaatgagccatggttactttgttccctcagtggagcaagttgctactttcaaggcggggctggggttccaaaccccttatgatgactgtcacacacattcttagtagatgcccgattctgctccttgacacagatttaagcacggcgtctggcacatagccatatgttccacagaaaccctccatccgcttaatttatgcttttggcatctccacctcgttatcagactggagagggtggggactcttctcactcagtgcaacaccgaaagtatgccccgtgctctgtgctaaatgaagaaaaaccaagctggcatctcagaggcgctcctgttcattaaagcctcccatcacagagaacactggggcagtgacgcacaggctgccacagggccctcacccctccagcctctgggttttctaactaactgttccaagtcagtgttgtgggtcaccaggaggcaaagtccatggccagcccactgcaccttcccagtggccagtggccataccaaagtcgccttccaggtacacatgcgaaaagccagtggctggtcccatcctattacaggattcccagagcctaagggagttacaaagaaaaaaaaacccaaacaacagattccaaagcccagagaatggggtggaagcaccccacttcctttacctggtctcccatcacctatcagaaccagagagcgcagaggacaggggtctccagaaaggaagaacatggattcggtcctcaggctcaccacttccttgttttaaggtcttgggctctgggacaaggttcccagggtccttggtttctctgaacttctgtctcctcatctttgagatgagaataaatgccacctagtgaaggtgaagactgaaatgggaaggaagtaaggattcttagcagcagtcctaacacccactgccttcaacaccaagcgcttaacacaatggcagccacacaccagaatgttctagaagcctgagaagcttgcccattcactggcacctgtgtgttgagcctcatgctggacccagggaatgcagaacacagttcttttagtttaccatcatcctcacagtacaaactctcttcctgctaaaaacaaaacaaaacaaaaaaaaaaacccactgggtgcccgtttttaattgtggtaaaatatgcataacctaaaaaaaagcttaaaatggttaagttttaagtgtacagttcagtggcattaaatacatttatgctgttgtgcaaccatccccaccatccatttctagaactcttttcatcttgcagaactgaaattctgtaccccttacacaaataactctctgtgtttcttgctttttaaaagtcagaagtaggccgggcacagtgactcacacctgtaatcccagcactttgggaggccgaggcgggcagatcactcgaggtcaggagtttgagaccagcctggccaacatggtgaaaccccgtctctaccaaaaatacaaaaattatccaggcgtggtggcgtgtgcctgtaatcccagctactcgggaggctgaggcaggagaatcgcttgatcccagggggctgaggctgcagtgagctgagatcatgccactgtactccagcctgggtgacagagcaagactccgtctcaaaaagaaaaagaaaaaagaggcagcttcctaaaagaccagaagttacatgttcctgagtgtactatattcctttttcttgtttttaaaatttttactctactctggagctgaaagtccgctttccagctactttctttttttttggagacggagtcttgctctgtcgcccaggctggagtgcagtgacgcaatccagctactttctaaactctttccaactaaatctgaacatacacttggatctcaaagttgcctcatgagttcactccctggctccatttggctgttcctgactctctagtgcctctggggcctccagggtagcagctcccatggccaccatgacagctgctcccactgaccctgttcccacgaacacggccacctccagaggttccagctctcccttcctgaacctgtacctaggaggagttcaaacagacccagaacttaacatgctctataaactctggcttcagatcaccctttcctacatgccacccccaaccctgccaaaacaaaacaaaagcaacaacaaaaatccctatccaggaaacctagaggtgggagtcggtggacatggagctccgaggggctggcttcaaccacccagagcagggaaggacaccttaattagggctagaggaggagaaccttttcaaggggaaagagaaacgagagaggcttcagctggtcacatttccaattcctttctgttcaaaaggaatgagatcaaaaggcttgtcaaagtggctttgcctttagaaatcaatttacctcatcttttaaacccagagccgataataacccagggtttccataccagcgatgcataaaagaaggaacattttaaagcccagcccagcccgaggacctggccctttggagttcttgaaggcagcaccagggaccccagcaagggcggcccctcactgcaacccctcactgagccccctcactctcaccacgcccctcactctcaccgcgcccctcactctcactgcacccctcactctcactgagccccctcactgcacttcctgggagaggcagaggctgccggagtccccgccctgagtgagtctgcaatgtagggtgggacacagagaaaacaagtcagggccaggggtgtgatgacggcgataatgatgttaaattccagagagtcctcaaggcctcacatagcgaaaaaggaaaggtgctggggaaggagaaactgcaaggacaggacgtgtgaggcagcgggagagggagagacagtaccggagtccgctcccggaaacggcccctgggcactgggctgggcatttcccaggcaccaatcgctcactggctctctcagaatcactgcaacccagggaggggagtgcagtcatcacccccatctgacaaaagaggaacaggctaggaggggttgggccgcttgccccaggtcacaccagtgtcagggcagccctggaggacaagaggagctgccccgggagaggctgagctgggagatgacaggtccaggtgccagctattctgtccgcaagtaggatgggagcccccccaccccctaaacccccagccctgcaggcagaggggcagatgaggcagaggcaacctgagcgaattctacctcccgaaggaagaaacaagggcaaggtaggagaaggggtacagacagaagcgccctcccagacggcccacacctcagccccgatctggcttcctctgaaggtctggactacctgttttggattaactgccccaggtggttatcaaaatagcccagagttctcagaaaccaccaacgcttccttcttctggcatctaagcttgggatactcgcctctgcaacttagtccatttccacctgaaatattcaacttcccagcctgtccaacatggtgaaaccccatctctactaaaaaataccaaattagccgggcatggtggcccatgcctgtaatcccagttactcaggaggctgaggcaggagaattgcttgaacctgggagacagaggttgcagtgagccgagatcgcaccactgcactccagcctgggcgacagagcgagactccgtctcaaaaaaaagaaatcaacttcatgagctctactccgtaaaatctgaatgccacaaattctcaccctaaaaacagggtgctagaagaccaattgagcacaaaaagtgccagctgctccggagtttctgtcctttaagtagccacaattccacactttaaaggcacgtaaatctgacttgctgggcagaaggtgagcctgtctggttactaaggtttggaaaggaggcaaaaattttagtcttaaaattttaaagtcattcagcctaaaccttagaatgctcaggggagccaagctggctagacaaagttgaaaacaatcaatttaatttccaccccccagggactgagcctcccagtacctgacatatggcatttccatcaacaaagcaaacaccacatgaaaagcctacaggtctgcgtgaaaacagtaggggagccctaagctccagcccagccccctcactgcattgcacctccataccggtttacccctgtttaccctctaaacagtcagggtctgggtccctgccatgtgtcagggacacagaggaacaaggcaggccccatcctctaattattcaacagtctagaaagggcagcaggtcgggggcactttgcagggtcattttaacctagagacaggattcccggcccaggcctggtgtgacaccgtgctccctgattgtaatgacttattctctgaattatttactccactgaatggtggcctccgttgttatgtatcttgtcattaacacatgctgactgacggcagacacatttccatgctggtgtgacagacaaacagaaagattcagtgcctgcttttaaggaattctattgctggtgagggataaaatcatgaggcttcctttgatgagataatatgtgtaagtcactcagcttaaaataaaacgatcatacaggagaaaaacgtgcagggctagagacaggcacacgtgcacactcgcaagattaatccaaatgaatcagagcgcattactccgggaggggtccttggataatccgctcagtaacaaatgaacacagagtggccaggggacgggccttgggtggggggcctgcctgccacccctctgccagacgggtgggcatcctcccctcccacccacgtgtcccctgagtacaaggcctttgtagaacccctcctacaaccctcccaggctggcactattaatatctccacttttcaaataagaaagactctcagagatgaagtaacttacccaaggccacaaatctgaggggtacgctcaaaggaacccaccattcgaccttgtgcctctgcagatggtgaggctcttggttgtttttccatttctatttggatttgtgtctcctgcctcccaagacccctacctgcaagtaactgccccctccgcctgcagaatacaggtgaacaagtacgtcccctgcagagtcagcctgggacccagagctgtcgctattattattcactgattaaagaaacgtcttgtgatctcatttgagcctcacaaccacctataaggtaatttttacccctgctctacaggtgaggttggacgatgcaccctaagtcacactgctgggaacagtgaacacaagcttctggaccagggaaagcgttcagggacccaagctgacacagtggcagagctctcatcattcctgccttcccacctcccattccaccttgttctctggcttcacttttctggccttcgggtaaccaaagaagtcaccccacagagctggctcacccacttccaccaggcagtggctaacgttatcccccagccgagaaggcaaacctgcctgctccctccccaggccaccagcccccaggccaggattgcccagctgcagctaaggaaagcaaccagaggcttctccctagagctgcagtgtgccccatctcttcccctacagaacacccctacatgtagaattaccacccctcaacccttagcctccccgaaacccaatcccaaaccaatagaaccctcccagtggaacgtggcagccttgactctttatctgaaatctctgcctcccccctaaataccaccaactcagaactgggggtacagagtgcggccccttcaacttttacagtactggctgaaaccaccaatttaagaccagcacttcctcatcctccttccctcgacattcctctcattactagaaaaataagacgacaattatatcgcgacaattacatctcgaaggatcaaggggccctggatgccaaggcgaagcagcagagaatctctgccattccccaaagaagagctgaataacaaaaactgttacgagccctggaggtgagccacgcagccggcttcacggagaggcagagcctgcctgggcaagttcttcttcagaaactccttttgacaaaccagtgagaacatcaaacatgctgatcctggcatctaacaccaaacccaaggcaaaggagaaacctctgttttttctttttaacgacttgagaaatccatttctctcctttctgtcacaaaaggaactggttcctcctgccacttcctcccactttggcgtttagggtatgtccataaagtgagctgtgtttccaaccttcattcacgcccgcatcactcgattcccacaacactcatcacccacaagtgcagctttcaatcggagctgaacgagagctaactaagaatgagcccgacaagcaccgggaacaccaagcacagctcactcgcggcttctgcaagcttaacattcatcgtttcagccataatttttccggaagcacaaattcagaccccttgccctccgatcaggggatcactcagcttccactcccagaagctttgttgcttactttgtgctccccaagatgggctcataaacacacatctctgtaaataaatggccatgaattaagaaacaacttcaggagttcgagaccagcctgggcaacacagggagactctgtctctacaaaaaatcagaaacataaattagccagaagtggtggtgcatgctggtagtcccagctactcggggggctgaggcaggaggattgcttgagcctggcaggtcaaggtcgaggctgcagtaagccgtgatcgcaccactgcactccagcctgggctacacagagcaagaccctgtcaccaaaaaaaaaagaaagaaagaaaaaaacttgagcaaacggtgaaaaaatcaatacttgacatggtaagataacctgtatcagaaacatgattctggaacaaacaccaataggggagggagaggggcctgggggaagtcccgatgtgtcaatgtccagaggtgggcaggtctccaagcagaccctgtgaggctgcatgttctgagcatctgggctcggtgctgtgcccaacaggcccaggcaaggggacagccacaggggcctgggtggcatccccaacaccaggagtgaaagcaagactcctgagccaaacctccttcccgcaaaggctgaggaaatgatggccgctcctgaaacaggagaaaagccccagcaaatcaaggtcttgactcaagtcctagagaaggaagcctcagagaacagaaagactgtgtacacacacacactcacacacactctcacactcacacactctcacactcatactcacacacacacattctctccatctccttgccctggctgaactccaactctgctaattacatcaaacccacctttcgccctctgcaacacctgcaattaaccctgaatctctgcttcctgccgctctggggtgaggggtgaagtctgaggccagctgctccctgttccaccctccgcccaaccccggaagtttcagaggtgcctgaagcaacccggtcccttcctctgggctccaggctggtgtgaagccgggttatcacgggagcccacactcccagctggggggcacaccacacgcagcacccccaccccactgcgggtgcagatcctgactggccctgccagcctttacaggacagcacgtccacctgcagcaagttacctccctacatgattctagaaagcctggcttttagaaagaagcttctccaagcagctgatgatgaagaaaacttgcagctttccggggctgtttcctgatcttgctccatgagccttggtttcctaatctatcgaatggagacagtaatttcttctttataataccgaagtaacagtgaaaaatgacgaggctctaaagcccccagcatgggcactcagtaaaggttaagctccctcccattcatctctcagccttttgatttgggcacagatctgagtcccacagttcctcgctgctatctgatatgcctggacagcatttcttctgacaacaaaaaggagagaaaagaaaggaaaacaagtccaactggcactctaacagcttacagaaaccaaatctgcctcccaagaggtttgggcgttcagcacaccaccaggtcctcagcccgtttgcttcacccctggccaacagttgaaccactgagcttgtaacaccaacactggctggcatggtggctcacgcctgtaaccccaacaccttgggaggccaaggcaggaggatcgcttgagcccaggagtttgagtagcctggccaacacagtgagaccccatctctacaaaaaatacaaaaataattagctgggcatggtggtgcacacctgtagtcccagctacttggtagattgaggctggaggattgcttgagcccaggagtttgaggttacaatgagctatgatcgcgccactgcactccagcatgggtgacagagtgagaccctgtctcaaaaataaataaataaaaaggtaaaataaataattgaaagaaatacaagcagcaggagccagcaggacagggagcaccacaggctgggagtgcaggccttttgttaagtgtggaaagggtgattctagtggccctgagagctgcagccctcttgtctggctgatcaggaagctactgccagcagcctgcagccctgggggcgcacaggtctgctgcagagcatggctttcctcggcccagacggctgttcctgctcctctagggtgcttgctccaggtgggcactgagccgcccacagctgagtggtctcctgggcctcgggcagccctgtgtgctggtgccctctctcctcaggggttctcctctctgcggaccactctccctctggtcctcccacttgggggactcctcactgtcatcttggggagtcccatgtgctctgcccagccctaaccctggggcctgctcccacctccttggccatgggcagttctcattctccatgcctgcttgtgactcttgagccaacctccccatggctcccatctgcattcccagccaggaacgctcagatccacctgaccgacaccagtgacaccaagctggcttgctccccactaagcccacttctcctcacccagagccccaggcccacccagagaacagcaccaacgccccaaccccaagtcacaccaggaacccacggacccctcagccctggattcccacatctgggctggatccccatagagtctcctagagctcgtccttctctctgctgccgtggccacagtccagggccctgccacctgccaacccctcccaacacctgtgcattctccaaatgggagcaggagttttctttcctaagctctctcttttagaagttcaggttcctaggccaggctcagtggctcacgcctgtaatcccagcactttgggaggccgaggcaggtggatcatctgaggtcaggagttcaagaccagcctggccaacacggtgaaaccccgtctctactaaaaatacaaaaaatgtgccaggcatgatggcaggtgcctgtaatcccagctactcaggaggctgaggcaggagaatcatgtgaacccaggaggcagaggttgcagtgagccgagatcgcgccactgcactccagcctgggcgacagagtgagactccctctcaaaaaaaaaaaaaaaaaagaagaagaagaagaagtagttgagatccctaagcacctaagcacagcctggagcctcacccccatacccgcaagagacgccccaaccttcaggctgctttatgtctccaaagctctgcaggtgccgctcttccccagaggacaccccttccctgccagtcaaccccaccagccgcaggcagacatttcccccgagaaagctctccaggatccctgctccccaggcctgtgtctggccatatcccatgtcctgcgtacacaggtgttattgcagctgatttacctggccactctcccaccccacaaaacgtgagcatctcgggcatggagaggacaagaaagagaaacagaaagaggaagagccggtaacctgtcaagtcccacccacctgggggccaccagagcttccacatcctgcatttccttcttctattatacaagctctagctagggaatggggatcgggaggaggacgggggaccccccgcagaccattgccctcctcaggcacatctcccagcagtctggagggttcgctcttgaattctgaacggactgcaaaccttcacatggaagctgactgtgacctccggatggttgggtccacaaaagctcccgctgccgacatggggacagagcccaggccagagctggactcccggccacagccaggccctgcccctaatggctgccttgttctctaaccccactacgattccctcaggcagtcctgctggagagatccccaaaaggcactcaagatcctccaacaaaaacgaagtccacccagacattgcaaacacaacctcaggacctcaccgcctggcagggactcgagaatcttcagcatgcaatagcaatttgttaaaatagctgcattttaaccaacacaatcacaaagggtgaagaacacaaatgggtaactgaccaaagaaaaaggaaaaaacctataaataaggctattttggcagtaagtagcaaaaattctcaaagtattcatgtcctttgacctaggaactccctgctaaggaaataagaacatttgttgaatgacttatgtaccaagtatgttcacagtggtatggtttataattctgagacaatgatagtagttacacccacacgataaaatgttacacagacaccaaaattcatattatgaaagagtatttaatggcagggaaaagctttctcactgcctggtaaatgaaaaaaaggcaggttacaaacagtataatgatacgagccacactttagaaacacacacacacaaagcaagcacaagtaccaaaatgctggcagtggtatacctaggtgttgagataacaggtgaacttaagtttctttctacttcctaatccatagtaagaatatatatatttatatattatatattatataatatatacattatatatattatatattatatacattatatattataatgtatatatttattatatattacatatattatatatatatatattttttgagacggagccttactctgtcgcgcaggctggagtgtagcggcacgatcttggctcaccgcaacctctgcctcccaggatcacgccattctcctgcctcaacctcctgagtagctgggactacagtcgcccaccaccacaccaggctaatttttttgtatttttagtagagacagggtttcaccatgttagccaggatggtctctatctcctgacctcatgatccgtctgccttggcctcccaaagtgctgggattacaggcgtgagccaccgcacctggccagaaaatatttttataatcaaaaatgttatttttaatttcctcacaatgtggacatgagctacaaaataaaaaatgtggccctcctctttaacctttgaagtcaaaagtggagaaactaatgtctcctctgcaaattctgtacaacgtattattactcctaaagcaaatgcctcttgtaccagtagccattgcctgagtggactctaagttcccttgaatcctgtccctgcccatcaaagcagttaagtggactaaaccctctagaccacacaaatgaaacacagccacaagtttaacgtgttctttccaccaacaatgtcaaatggacatttccttctattctcgcttttgacaaaagattttccatggtggatcatgcctgtaatcccagcactttgagagggtgaggcgggaggattgcttgagcccaggagtttgagaccagcctggtcaacttagcgagaccttgcttctactaaaaataaaaaaaagtagccagacgtggtggcgcacacctgtgatcccagctactcaggaggctgaggtgggagaactgcttgagcctgagaggttgagactgcagtgagctatgatcataccactgcactttggcctgggaaaccgagcaagactgtctcaaacagcaacaacaacaacaacaaaaaaacacaaattaaaagactttccttcttcaaacaaaatgtccacatttcttaaagataatcctaatttttagtaaacagagcatgcttatctaatacaactaccacagaggctgacatctcagaaacaaggctgagcagaggaagaagttacaggcagtgtgctgccgtttatggaagtctcgaagaaagatcacacaaagctgtgtgtgtgtgtacacaagtgtgtatagtgtgcacacacgcatatatatacaacacacacacataaacacagcaagcggataaaagtgttaagtagataccacccaattaatgagaggtgttaaccccaggaagggagaggacaacagggcttagtagtggctgctgggaacgtctatctcaagagaaaatttttatttcttaaaaaaggaaaaggtctcaagcaaatatggaaaaatagaaccgtatgttcatatttattttgaacgacaggtatgtgagtgttcgttatgaccacttgtactgttttatttttaattcttcaaaacaataaaggaaaaagaaaagggctgggagaagctaaggcacccgggctgtatttattctgctgtttcacttgagataaggaaccttctggccttgtgcccatgctagaggccagaagtcagagagccgagctcaaggaacccagaaagctaaacttccttgagctgatcgtaaactctaaatctcctctaaatctcgcagtttctggtcaccatgcaactgtagcatttcaggcccacccccttttgcttgaaggagggcactcaggaggctcagagaaggagagcagcccgcccagagagacggcgggaccccagccttgctgcctctgcacctggcgaggagaggcgcatgaagaaacagcaaattcctcatttcagagtgaatccaatgggtaagtccccacatccatccaagggtcccgatctcactggatgagatatccacgtgtggactcgatgacaaagacatacgtctccaacaacacacagggaatgtatccaggccaccatctgaagtgcttcccgccatacaaagccaaagaaacctcagaaacttcacatgacaatgaggccctttccagacaaggcgccggactgaaggtgtccagggcagggaatggggatgggatgccaggcacaaccccagagcacagacaggccagccactgctgcacagggcggacttctgctggaacagcctcactttcagcctgactccactatctgcatttaatgtaaacattcaaggctcttaatgaaaaaagtgaaccattacataaatccaaaatttaattttaacaaaagccaggccagacgccgtgagccttacaggctcgtgcctataagcccagcactttgggtggccaaggcaggaggactgcttgagctcccaagtttgagaccagcctggccaacatagtgaaaccctgtctctactaaaaatacaaaaagtagccaggcgtggtggtgcccactggtggtcccagctactcgggaggctgaggtaggaggatcgcctgagcccagtggagggggaggttgcagtgagctaagactataccactgcactctagcctgggcgacagagagagaccctatctcaaaaaattaaattaaatttttaaaatgccagatgaaaaggaggttggctgttgaatgagtaaaacaagcatcggaggacacagggtaaacctggccagccaggctgaggcagcgtggggctctggcccagccttgcctgtcctccaggctgctcagcagatatcccatttgagggtgctgtcctaaagccggtgtccccacattggacaggccagccttttcttctccaaaatgcagagactgacccaggtgctctctctccaaggctttgtcctactctggctttctctgccccttctcagctaccccctcaacaccccctgctccctctggtaaccgcatcctctccttcccctcctccagtctgagaccctgccttcctgtcctggggcggtgagacgtgaatctggtgtatgtgatggagaagggtcacctggtgaggactgagctccttctacccaggagattcagctcaacgtgactcttctagaaatcaccagaaatgttctaacccattggttccagtggttcccatgggcatgtgcgtcagaatcacctgggggcctgttaaaatacagactcccaacttacatgcaggcccaacaatctgcatctctaacaagctcccagcgcggctgcagatctggggaccatcctttgaagaaccaccactctcacccactgattctcaatcctgttggaatggtgagactcaagaagctgggaaatttttgaaagtgcagattccttggctgggcgcggtggctcacgcctgtaatcccagcactttgggaggctgaggcgggtggatcatgaagtcaggagatcgagaccatcctggctaacacggtgaaaacccgtctctactaaaaatacaaaaaaaattagccaggagtggtggcaggtgcctgtagtcccagctactcgggaggctgaggcaggagaatggcatgaacccgggaggcagagcttgcagtgagccgagatcacgccactgcactccaggctgggcgacagagcgagactccatctcaaaaaaaaaaaaaagagaaaagaaaatgcagattccagggccccaatcccagaagagtccaatgcagtaagccaggaaggcggagaatctgccttagaccccggtggtgggataggatctcagccacactggtttccacccacttgctgacctatgccctgctcaggaaaaggtcaaggaccctttgcctccccaggttctcagaggtcaacttgagcatcctagcgacacggcccacgctctttaggaaaggcctggccttccagactgtcactgctccagtgtgccgcagagaagaaggggacagttaggggcacagagccatctcctggcaaacaaaacccagagccagaatgcgcgaccttgatgtgtctaccaaaaagccacaggtgagagggaggcccgcccacgcagcaccccagtcagagtaaggaacaaggtttgtcccacttcattccaagccctcaggaccttcggggctactttcccaagaagaggccgggcggcagctttacggaaatgttctggaatacccctttactataataaccggttatgtttgtgctataatgttaggtgggagggaaaaaaggcaggatacgcaattgtatatatggcaacaaccacaatggcataaaacaaaaactattcactcaagaactgaaaggaaatactacaaacgttaacggcgattgtctctgggtgctgggctgatgggtgggtcttttctcttgctacttgtctgttttctaagctgtttacaaagagcacgtacagtatgacctatataacaaaaactttattttgttataaattggaaggaaaaaaaacacacagcagaacaccgtccacatggaatgtgtcagccctgaacacaagcgtcctgtcagcttccttcaagagggcaggactgagacgcagtgaccactccctggtcagcagcaagtactgtcagcatacactgactgaccatttgctctgagctgggccgagactgccagcgcacaccagcccagtcctccaagagctcccagcacaaaaggagggagagcagggatgcagggtcctctttccatctggaagtccttctggaccctgagggtgggctggccatcttttactttgtgtggccacttcccatcttctggaactctgcacagtaccccaagaacagcaaactgcttctcaaacccacacagtctcaagtgagtgtcaagtccattttgcccggcccagagctggatggaccctcagagtggctggtcaccaacagcagaagtcctcctggactggcagggccagaggatggcatttctatggccaaacagcttgcagcaagagcctcactgccccatgctactcacaaagaccttcagaaacctcacctccatttgagaccttcatcaatccaagctcacccaagagctcacagtgcaggaggagggaggacagggatgcagacacctgcccagtgctataccactggctctggccagccctgcccattccctcccatgaccctccaaactggaaactcagttgcccactgaaactccactcaggtatcacctcctccaagaagacttccccaactgcccgcacgcaggctgggttagggggtcttgcctcttgaactttcagcactatgtgcttcccctagcactcagcacagagtcctgaaagcacttgcctgtcacgaatggcacctgcagacagggcccatgccctgcgtatctgctgagcagccggcacagccaccaggccctcatcacagatgcccaggtcattgacagcaccattgcctttaccccactgcccctgtgcatggctgtcgcgagggagacgccagcagaaatgcccctgcctatagcatacaccatgctgagtgtggctccccttcaaatccccagagccaactctcacaggctcccacaccagccctccaggcctctccctgaccctcggcccccacctcagacatctggaactaaagggatggggctggttctaagcttcccagatgcaatgtccagagagcccatagtgcccctctcccaatggtctctggactgagcacagatggctcactgaactggcccacacaggcaaactacgccagccccccccacccaacaggaggaggacggaaacaaccatctcagaaaacccaggccattgtccactccctccctctcacgttcagtttcaaattcatgttgaaacagaagcaaccacagccctcaacaggaactgggcccagcacaaagcccaatgccacagcacacattctgcctggcagcccacccagcagtccctcagcagaccccagaaccagcaaccactgcacaagggcagaaggggagtcacggctggccagacggcttcctcatgtcaacagaggcctcacaacatccaaagatgctcccgaatcccagaaccaagactaagttacagcccaggaagccaagtgcgaggcacaggtcccaggcggagtctggtcacatgtttagtgaaacgctggcgtgaatctgggaggcagttgttcttgagcagttctcaatctgtgtcctctggagtcccgggaacccagacagatgccctggaggccgaggagacagctgagcacagtgcactgggcttcacctgggttctcgagaaaaatcatatggggggaacgtttcactgctaagaaaaggtttgaaaaccagggctccaaggtacacagtttcagtccatttccatccgtattggccacacagagatcactaacaccatcaaagactcaactggccttcccaaggctgggatgggttttgggtttagttttgtttgtttttgagatggagtcgtgctctgtcaccaggacagagtacagtggcatgaccttggctcactgcaacctccacctcccaggttcaagcgattctcctgcctcagcctcctgagtagctgggactacaggcgtgcaccatgcccagctaatttttgcatttttagtagaggtggggtttcatcgcgttggccaggatggtcttgatctcttgacctcatgatccacccgcctcggcctcccaaagtgctgggattacaggtgtgagccaccgcgcccagcctgggatattaaagagcaaatccccatcaggctggcttgactgtcccattgaccacacagatcagatgcggtaaacacttgaaagacagacgctccctaagcccagtgctcctgcttgcagctagaggtgggttaatcacattcttggtcccatcttcataaccctccagtggttcctcctctccctcaacccttgaatggctcctgtataaagagccactgagccaggggctgcggataaccacctcagggtcaccttcaggaagcccattccagccagtccccactcaactgcattctcggggcagaggctgcaaactgaggctcctctctgggaccttcacagcatatagcacgatgctacacacagctcaaagaacattcaccaaacaaaggaaatcaacgcaccatctcatcctcacacatgccccaacaaagggttcacatgaaagcagaccaactgtcaacaagtagaggcctaaacataagcaccgtttcctcccggcctcctgtgggaaaaccgtgacagtgacgatactgatggacacacatcagaattcccgacagcagaactgcccttacctggtagtaggtcttaatgtttctcaccaagatggtcaaattctgaatgcgaaggttcacatcattgttgacgtgcttattgatgcgttgatttgtgggcctgggatctctaggggaagaaacacgagaatggaaattgcatctcccagcagctgccacacttcctttcccagccacgacccagcatcttgtcctccagtccctaggtgaccatgaggctgtgctgtggcagttgtggttcaagtcaaatcccaatcctgccactgctaagccaggacctcaggtgggccacatcgcctttctgctccctgacccgagcacctggcccaccgcaggccctcagtcagtgctgtttccattcccaccgttcctagcacccacaaaaaccaaccacatatcagtgcagaccccaaatgttatactgtataaaaccaacccagccaaatatatttcaagattaaaagaattaaaagctgaacaaagaaaaatatgtgaaatatcaagaaagacagaaggagaaaaatggtagtttttttttttttttaaatagagacaggtctcactctgtcacccagtctggcatgcagtggcaccatcacagatcactacagcctcgaactcctgagctcaagggatcttcctgtctcagcctcccaggcagctaggactacaggcccagctaatttttttttaattttttttatagagacagggtctcactatgttgcccaggctggtctcgaactcctcaagccatcctcctgcctcagacccccaaaacactgggatgacaggtgtgagccactgtgcccagcctaaaacggtacatttctttttttttttttttgagacggagtcttgctcttttgcccagactggagggcagtggcacgatctcagctcactgcaaccttcacctcctgggttccagcgattctcccacctcagcctcccaagtagctgggattataggtgcatgccaccacgcccagctaatttttgtatttttagtaaagacagggtttcaccatgttggccaggctggtctcgaactcttgacctcaagtgacacccgccttggcctcccaaagtgccgggattacaggtgtgagccactgtgccaggccaaaatggtacattttctgacttaattcgccaataaaatcataatgttccattaaacacaggtctccctctgtcatgcgaattggtcttgggctggtcctccctgtgatttacaaattccagggacaaaaatcctatcttgagaaactggcataaacaatctatggcactctatggtgtacaatgcaccctgtaagaaatgctaagagacacaattaattcatgtggggaatccccgaagtgtcatttattttccaacctcaggcaaaagttgggtctggctgtgatgaaactagaaatctacatcaagtgatgtatcatgtccctccctcatctatatacaggacatttctcaaaatgctcagtgtcagaaaacgttccccattagacaagagcactcagcattactgagttcgcttccacccttccacagactgtgcgctgcttttcataacaaaggcctcccttccatctgacagtcccaagacaccgcaaaggatggctaattcaaaggagagcctgtcttcacagtttcttctgttatccagaccccgtgatgaaggtgctgagcctcttgggggttagtgtggggagttaaggaaatcaatctcaatgccatctggctcattcaaagccaataattagtagaaaattgacaaaggaaaaaaaaaccctacaaatcgaaaacgtttcaaatgtttctggaagtacagtgatggagtgtggccaagtcatttacatgttacatgtttctcttggagtcatgcataactgagaaaataaaggttaagagttctgtggaaattaattcaggaaaagaagaggcattcagaatttaaactgcaaaggcatttttagctacagaagtgttcctggcagcataaagtaatttatcttaaaggtacaattcccctccctttactgtagataccttaaaagatgaaaatcaatttcacagtgacaaatgcacttcttaaaatagcagaactcagagaacatgcagcgctttttctgttttgtttcttctttctttggtctttgtcattgtagacccatctttcattgaagtcagacgggaccaccccaggagtggccaggagccgaaagcctcagtatacatcgtggacatctccagcacgtgcaaaggcatagcatacactcagggtcgggaacctgggagtcccctcacatcacagcatagaagcctctgaccatccctgctattgttctccccagttcttgcaagaaatagctcactgaaacaactctaaaagaaccctgacatttactgtatgagtaattaagctacttaccgtgattattacgactccctcctttaactaagcctctctgggtagagagctatcaggacactaatcaaaacaaaagcctcaactacagttaaggcaggcacatctcaatctccactctgcccagcacccccgtaactcccacctttccatgctgtacaaaatgggaatcaagagacatgggttctagcccaggtcccaagcccagccaaagctcactgggcttcagtgttctcatctgcaaaatggctacaggatccttccggccttcaaagtctatatggttccatgaagcctacatctgcagtagcaaacgtggactgtacttgcttctgtaccacaggaagatgttattataaccgctaaacaactgcacttccccaaaagttgtcattcagaacaacaatcatctttatatgatagtcctaaaacttaaaaggccaacactctagtatcaggatctcagaggacacgacataaatatggtagctggtcggaacttggagagttccaagagttccaagtctaaagtgtgggcccccagggattccttttcataaaaacttccaactagaaaaaaagaaactggccaagcacgatggctcatgcctgtaaccccagcactttgggaggccgaggtgagaggatcacttgaggtcaggagttcgagaccagcctggccaacatggtgaaaccctgtctccactaaaaatacaaaaattagccagacatggtggcatgcgcctgtaatcctagctaatcgggaggctgaggcaggagaatcacctgaacctgggaggcagaggttgcaatgagcagagatcaagccactacactccagcctgtgcaacagagtgagactccatctcaaaaaaaaaaaaaaaggaagaagaaagataaccaattcttgctagaattttaaaaagagttataatttaggcttacagtaaccttgcccccctcctttgggaaagccagcccccaacttttggtcatattccaaaaacttcctaaatttaaagctaaatcaagaaactatgtattgacacagagagatatccctaatttatcacaggttaaaaaacatgctaaatgtttttatatatgtttaatgtatttttatacaaatatggacccatgctaaaaaacaatagcaagagtccatatttgtataaaaatattaatacattaaggacacgtattaatatatatcatagataacattcggaaggcactagaatattgacattgctacctccacatggtaaaatcacaggcaagttttattttgctcatctgtatatattcctattctcctaagatgaacatagtttgtgtatttttttctttttttttttttgagatggagtctggctctgttgcccaggctgggtgcagtggcacaatcttggctcactgcaagctctgcctcccgggttcatgccattctcccgcctcagcctcctcagtagctgggactacaggcgcccgccaccacgcctggctaatttttttgtatttttagtagagacggggtttcactgtgttagccaggatggtctcgatctcctgaccttgtgatccgcccacctcagcctcccaaagtgctggcattacaggcgtgagccaccgtgcccagcctgtttgtataatttttaaggactcaaagcccccatgtgtcatatactgcagccaaaagatggaaattacttaagttcataggtaaaaattgttttttcccaagatttttgcgccaatacaaattcattcaaccaacaagtaaaatttccccttttatcctaagcttctacatctgcaaaagggaaacataaactctccttcaagtgcactggggtaaaagttatccttcaaatgctttttgggaggtaaagaaactctcctatttccccgaggatgtttctaacctatgaataattaacacagtatcctgaattttgcagctagcaccaggggtcacaagcagcctgaacaaatatggttgaacttaaagggcacaagctctcagccctagtaccaagttccaactttagccactgcgtcaaaccggatggtttactctcacaagtagagatgtacagcactaagggcatgggtacacgtacgtatgtccacacacaaactcagatctgggcctcatctgcacaatgatagacatatgttaggcttgttctatatacatagttttatttaaatctcccccaaattggtaaaataccatccccttattacagatcaggaaatcaaggcttagagagtttcagtcatttgcccaacataataacactaggaagtggcagagtggggatttgaacttgtctgcctgatgctagggttaaggctcttaaataattttcctacaagagaatgaaaaacgtgtccaaagttaaccagagcaaactttgttttctcttgggtgctggtaggtacccaagacactgtgttgacagaggggctattgagcaggcattcccaggcctctccatccaggccactcaaagcctcagtttcattcatgaattctcctagccctgggcctccccagaaagctgaacctgtggggcttccctgcttccaggtgctgatgtcaccaggagaccagggccgagagactactaacagccttctccggttgccggagacaatggccaggtgcagtcacgtgacccccagccaacctccacaaggctcccaggtgttaggtaacagcctcttatctgagctctgttagcagtactgctcaacgcgatttcttcaggtcctacaaacttggggtgaaggaatcaaaacaggcaaatagcacagtctaggagctactggtatgggagatgaggcagaacagccttaccccttacctgctggctagtgacatgttgccatttggtagaagtgaaaacagaggcttaagtgcagtacagtctaaatgcggggctaggacttgggtcccagggtccaatgttgccctagacctcattggtagagggctaagggctgagaactgtggggtaatccaaggatcgaagaatgtgggggaaaaggtaggccacacaaaaaaagaacttttagttggtgcctcaaatcctttctggattaagatggcacctacataggcaaatagctaaatgttaacacaaggtttcattctgtcctcacaaccatctcttaaggaaggtactttacgtcccattttacagatgaggaaactaaggcactgagcgacatgcccagtgtcacactgctggtaaaagggaggccaagggtttgaatcccagctggctatgtaggctgtccgatacaggccagggttcattgtttagttgaggtaattttacatagcatgaaatgcataaagttataatttgaggagttttggaaaatgaaacatactccagccactctgcaggacatttcaactaccctgaaaaggttcccccgggtcctttccagtcaatcctcaccacttccagacacaaaaacactattctgacttctatcacctggaactgggtgattctgatgacccatgcaggaaaccatgcccacccgctctctcttctctttcctcattctggaaagccagccattcagcctccccacgctccattcctctgtgcccaactcatcctgagggacccagaagcacttcttgaagtcttaagagctacaatttaccagttcccacttctggaatgattaccttggcatatcacagagagaacatctaaaattgcccagggaaggggagaaaccctcccaccccacaccaccccggccgaatttagccatgggccaaatgagaacaagtgatgagctggcgtttctcaaaggaacggtccaacaggctttcctgatttacaagcaagtgggaaacgcttcaggaattccaaaggtcagggaagaaagagaaacagtcccagtgcttttgttcccccctctgcctgggtgtaggagctgaatgaaaaggctggggatactgctggtttttttaattaaacagtcttgggcttgggtaaggacaggttgaagtttcaccggtcattgcgccaatggaatccagtaattttcagggtctaacagaatgaggggagagtggccagaactcgaatatgccacgagacagcttccggaaaactcagtttcaacaaagttatctaagaagtgctgtcaaagctggcaacagatttatgtttttcaatctaatcagacactgaagactggtaagattggtagtgactttttttcctacacccacagctgtgaactttaaaaaaaaaaaagcaaaaaccattaaacagcatgacatcaaatgacttattaaaataaaaggaggccgggcaccacagtggctcatgcctgtaatcccagcactttgggaggccaaggcaggcggatcacctgaggtcgggagttcgagaccagcctaacatggagaaaccccatttctactaaaaatacaaaattagccgggcgtggtggcgcatgcctgcaatcccagctactcgggaggctgaggtaggataatcgcttgaacccgggaggcggaggttgtggtgagctgagatcacgccattgcactccagcctgggcaacaagagcgaaactccgtctccaaaaaaaaaaaaagcaaggttcttgaattatttttttctaaacaggctgtttaaggcaatctatataagccactttctggatatgccaaagcaaactgctcctctgcctttgtgagccacaaacgaagctgatctctcattagctaatagatttatgctccagtatgacaacttgctcagtcgtaggtgaataggtgcgcacacgaggctgatccacagagaacattaggatgttttattttgcttcaagtgcctgtgaatcatcccgacactcagttccaatgttccctgcagtttgagttaaaaacagaatgcaaaggtagaagccaacacctacgttgtggcaagctgtcaatcaggccgtgcagagctcagcaacaggaaaggatgtggtcagatgtactcgctggcaagagtaacttctactaagaccctgttcaggctgcatgcttccaaacaaacagcaccatgggaccctcctaacactgtgactttaaactcagtccatacagtaggacttaatgaattgcacttgctttggggcaactgaaaaaggaagatgaaatgtaaaggagctcagaaacacagacaccctcatctaaaatgaaactttacagtaaccctcggatgcctgggcccaccccgacacttcctgtaaccagacactctccgttacagttccttgccctccaaaaggggactttttcatttcattgctcaaaccacaattaagtccttgagtctgaagtcaattgcactatctacaccacgtaaatgacagtcattcaattccaaatttccttcatcaaaccaactgccagacccactgtcctggagttcttcaaacacctacgaatgtccaacaggcacgttaatactgagataccagcgtctccaccttcagagaactaccccccaccccacacacaccccgccatgcaaccttccactccatttctactctcaaactttctaacgcaccattctttccttcctccgagaagaaggtaacttacatttgcagcataatttggttcaaaaagatgccgtccactaaatccatgtacatagtcaggttgtcctggctgccgcttccaaacgggccaaaagttttcacctgcggggagggggacgaggagagaaagacaggaagtcaccccgtgcgcacaaacggtccaaagctctcccaggcagagactggacgggtcagtgtgagcagaagggggtcacccacgcccacaccacccttcagcaggcaccaagcccggccttctcctagggcctgtctcccctccccgcgcggggcaacagacacgagacaggaggaaaaacttcctcgccacttttctcccgcgttccagagcggaagaaataaaaataaaaaggacttttcaataaatgtctcacgtctcaaatccattgtaaatcagtgcgcccaccccagtctgttcgctttcccattcggcgccccccattccccacccgtcaccgccatccaccggctggtctcagggattcagaaaaactacatgagatatttggttgggaagaatggggtccttttcgggagtggctaaaccccagggacaggagtgaccactgggacccggtccgccccgaggcagccagcctagagccccagcgggaacaggtgtacccgcccggctcctggcccggccgaaagcgcggcggggtcccgcgccggacgcacaacgggggcgccggctccagagttacaaagctccggactccaggacgcggccccaaccccggccgggagccacttgctgcgtccctcgcgccccggagccacccggggccccggccgtgtcgggtctgcggcgtcccgtcgccgggctagagagaagccggtgcaccaacaaaggggcggggagccaggcgcactcacccaggtcaccagcgggctctgcaggaagagctccaggagctccgagactgtcacgtccatgctgaggctgcgcccgccggctccgcgccccccgccccgcgtccccgttcccccgcgccgcggcacaaaacggctccgcagcgagcagcgggcgcggggctgcggcggctcgcgcccgggagacaaaggcggggcgcgcgagcccacgttccgcggcttcggcggccccgcgccccgcccgggtctgggggaaggggagggccagccgctcggggaggaacaatacgggcggccccgcccctcggcggccctgggcgaccggcgcgccgcctcgcggtgccagcccgggagcccgggagcccgggcgcgggaccaggctacgcggggcgctgggaggggactggtggcccgaggcgggtgggtcgcggggcccggctccccgcccgtgggaccgcgcgccctcgccgagcgcagcctccccgcgtgtggggccccagcacgtggcgcatccctgcgcgcgtgcgcgtgcagccggggcccgagcgccacgtgcgagctggggtgcgcgggcactggtgcgtgccgggagcggggacgccctgccctccgaggttgctctgccctccgaggtcgcccgcagctgccgcccgctctgggcttggggacctcggccctgcgcctttccgcactcctggcaggtgcagccccaggtacagtcaagaggccccgcaaacccccgctcctcacgcttgtgcgcggcgcgataaacgcgccccgaccctggggctgggctggagggcaaagaagaaactttatgttgagtttaggccttaggggcgcggcccctcgcgccctaccgtgccccaccgtgccatgttccgggctgcctgccttctaaaagttcctgcaggaagcaggtgatgtggcctccccgacccgggcccgcccccaccactttgccggaggcgagctaaattccagccggggttcctagcagcagcttagtggcaggcgacaggaaaaagggcaaaggccccaactggctggaaggcaagcccgggggcaggacctccttgcgggacggcacgaggcaggagccggctccaggctggtctcggcctggtaataatttcacaccaccagccggtcattgttcaaagcactgtagaccattttactaatttaaccctaacgatcgccgcatttcgcagctgggccaactggtacagggttgacccgaagggccctgcgtggcgcttggcaagtatacagcaggcactaaatggctgccgacaggctcggtggtaattttgaaagttggctctgtgcagcgttggggctgcggcatctgctggtggcgagtggtattacagcccagcgctggcggaccccgttgggctggggagggttgtgagattatggcctgagagccaagggggtcggttaggggtccctagagactgtggaaggcggggtagcataaaacacaatgggggactgcggaggaactaaaatttcgagactacatggttttgttgtgcaccagaagttcattagagaagttccttaattgcttctccgcccgccgcgatggcactcgaccccgcggattaatttaacaactctgatggttgctctgtgaaatttaaagaacagtggtttaagcaaagaccacaagaaagaagaattgagatcaaagaggagtgtgtgccat

SEQ ID NO: 95 - DNA, 34620 bp, Homo sapiens
  source 1..34620: mol_type = genomic DNA
cctgagttaatcgcttgcacctctagtttattcgctcccctcctccgccttgcagggaacctagtgtacggctcacccagcccgcgccccaccccgccttgctggctctccgcgcccctgcccgggccccctctctcggtgagggaggcactcagtcggcctcggtgtgcccagagagctcgagccacgccatgcccgctgcacgtgccagcttggccagcacatcagggcgctggtctctccccttcctcctggagtgaaatacaccaaagggcgcggtgggggtggggggtgacgggaggaaggaggtgaagaaacgccaccagatcgtatctcctgtaaagacagccttgactcaagcatgcgttagagcacgtgtcagggccgaccgtgctggcggcgacttcaccgcagtcggctcccagggagaaagcctggcgagtgaggcgcgaaaccggaggggtcggcgaggatgcgggcgaaggaccgagcgtggaggcctcatgcctccggggaaaggaaggggtggtggtgtttgcgcagggggagcgagggggagccggacctaatccctcactcgccccctccccctcccgggccatttcctagaaagctgcatcggtgtggccacgctcagcgcagacacctcgggcggcttgtcagcagatgcaggggcgaggaagcgggtttttcctgcgtggccgctggccgcgggggaaccgctgggagccctgcccccggcctgcggcggccctagacgctgcaccgcgtcgccccacggcgcccgaagagcccccagaaacacgatggtttctgctcgaggatcacattctatccctccagagaagcaccccccttccttcctaatacccacctctccctccctcttcttcctctgcacacactctgcaggggggggcagaagggacgttgttctggtccctttaatcggggctttcgaaacagcttcgaagttatcaggaacacagacttcagggacatgacctttatctctgggtatgcgaggttgctattttctaaaatcaccccctcccttatttttcacttaagggacctatttctaaattgtctgaggtcaccccatcttcagataatctaccctacattcctggatcttaaatacaagggcaggaggattaggatccgttttgaagaagccaaagttggagggtcgtattttggcgtgctacacctacagaatgagtgaaattagagggcagaaataggagtcggtagttttttgtgggttgccctgtccggggcccctggcatgcagggctggatggagggagaggggtggggggtggcgggggaccgcgtttgaagttgggtcgggccagctgctgttctccttaataacgagaggggaaaaggagggagggagggagagattgaaaggaggaggggaggaccgggaggggaggaaaggggaggaggaaccagagcggggagcgcggggagagggaggagagctaactgcccagccagcttgcgtcaccgcttcagagcggagaagagcgagcaggggagagcgagaccagttttaaggggaggaccggtgcgagtgaggcagccccgaggctctgctcgcccaccacccaatcctcgcctcccttctgctccaccttctctctctgccctcacctctcccccgaaaaccccctatttagccaaaggaaggaggtcaggggaacgctctcccctccccttccaaaaaacaaaaacagaaaaacctttttccaggccggggaaagcaggagggagaggggccgccgggctggccatggagctgctgtgccacgaggtggacccggtccgcagggccgtgcgggaccgcaacctgctccgagacgaccgcgtcctgcagaacctgctcaccatcgaggagcgctaccttccgcagtgctcctacttcaagtgcgtgcagaaggacatccaaccctacatgcgcagaatggtggccacctggatgctggaggtaggtcggggggtggcgctcgccaggagccaggacccctccggatgctcgggtccccggccggagccctaaacctgggagagggcaatccccgcgccggcctcccggctcctgtgcgggagtttaccgcgcgccttctggcgagacgcgtggctttatttctgttcctctccagataaactggggaggcagaggggggaggaaaatctgggagaagcgaggctgtcctgggcgggggtaggggagcatcccgcgcgcgtgttcctgcatgtggctgcctcttcttcccacccccctcgcgacctgtcttttgcgaagccgccgcggctgcttgcgctgcggccaggaagagagtcggggcctgaaatcgggaccccgagtagaaaggcaaccccccccaaaaggccagagcaaattcgtcttggcctcaggtccccgcctgtggtcgcgactccgcgctggcacttcaccggggaggtggagggaggagggagaaggagagaaacggggaattcgggagccccggaagtcccattgaagaaacgcgtgtttcaggggaacccaaaagaaccgcttcttgcccctcactccaagtctttgcccagcgagccgtgtgcccacgtatgcacagctctggacctgccgtggtttcgccatgttgctttgcaaactccctttggaaaggctgggaaacgtcgcccgcttaccctcgcaccccattatcccggccaccccacttctaatcgtgccctctcccccaccccccacctcacgaagattacttacagtttggttttccagcttcctcggtgcggagatttgggtggggtaggaagggggggagggggtgtgtgtaggggggataccgggtcacccctgaaggagaggtgggagccccccgtgcctctttccagggctctctgctcccgtctttcccctcgctcgtcaccgcgttccctagtttctgtccttgtgggccgcagccggacactcccgccgcggcgctcaccccttcaagtttcctcccgggatccaaagccccaggggtcggaatacagacctttctggcacccgaaacctctgtttcgggaagcctggctcttctttggggttttcacgccaaaagggcttttctaggatatttcctcgatttttaattattttttgaaaccatccccccctgctccgactccagctgccgaggctgcggcgctcttcctcctctcctccctccccctctcttccccacctctcctcacccgcccccccaaaagcggcccctgggccgcagggacccccccagacattttttccaattgtcgggaatgatagaggaggatctggggatccggatgagaccaagaagtggacccccggagcctccagaatatttttattgattttttgaaaagatgacgaaatccaaaaaagagtgagtgagttagagtgcgcgaaggagtagccaaagggagcgtcgcggagctgccgcggctgctgcgcacttctccgactccccgttttggagctgtagttcacccccttttataggatccctgggaataccaaagcactgatgggctattctgattcactccagtttcctcatctttgttctttattcttatcacgcattctggtcccctccccctcccacaaaaaaaaattaattttttttgtttcgatagattacgcttttttattctttttctcttttgctgatgctatgctctccacccccgccccccaaccctttcccactcccattataggtctgtgaggaacagaagtgcgaagaagaggtcttccctctggccatgaattacctggaccgtttcttggctggggtcccgactccgaagtcccatctgcaactcctgggtgctgtctgcatgttcctggcctccaaactcaaagagaccagcccgctgaccgcggagaagctgtgcatttacaccgacaactccatcaagcctcaggagctgctggtaatgaccggccccttcctcccttcctttctgcgattcccgctttcccctggccaacaatatgccttctatcaccactgccagagcaaattcttgggatccagaatgaccccaccaatagaatttacccacttatgggcgatagctcatttaataggaaaccactgtttattttttgtgtgttcctactatgtgcccaggctccgtgcccagcactgaggctacatctgtgaataagatcctcatggagatttgggttggtgagactcatttgcaattgtgtatgcatgtgtgtaggggacgcatggaatattttaattaacagtgataatattttaattaaattccaaatttccaaaaatagtctgagaacgtgttcacatgataggtatgtggctgtggtgtctcctaaaaacttggagttcaaaggtaatgccctctatatctacaaagtctcaagataccaacacataatagctgttcactaaatatcagttcattgacttttgagcaaagtcaaaatgtggcctttcactgaaggagtccgaggcctgggttcctacctccagtgggactgtgacctctgtacaaccccagggatcctgtcttatctctgcttttctaccagggaacctttttcccacctgatctaactccttttccctgcagcttgacatataagacgaccatattgcagctgtaccgcatggaatagcggctccaaggcccaccttcggtggtttgcacacccctctttgcactgttcagaaaagcaccccctccttcccgcccctccccctcctcactggtagggcccgcacaaagtccacagggctgaggctggcttcttgaactgagctctttgtgaggagccttcctttctggggctctgctgccatctagtggaagacatgcacaaggttgggggaggaattgccgagaatgtggagaggggcctgaatgacttcacctttgaaccgctgccaggttttagctgcttctggtttggtccgagaggcctagaaaggtgctttcttctgggagatctgcttcctttaataacggtgcaagaccagtggttcgtactcgcattaccctgtgaagaggaagggctggcatttcaagccatctttgaagatgatggtggtttagtagtttattggggtgctttaccccggctgtacacagaaagccaaggcagattttaaagcttatgaagaaaacattgttagaattgggaaccaatttgtttttctcatgagagagcaggaaaaatcatcttcatatggttcatttgtttcgagaggatggtgaattgagatgttcttcaggacacccaaatctttccaggactagccaagcaatatattgctacaaacaaacttggctttttcctattccctttatcccagaagttgggatttggaagagtcctattttacaaatgagaaggctgaggcctgggagggaaagggaatcacccccagccccacagctgtgggactggtgctctggttgctggtttagcaaatgaaagagattccaggttctccaggtgaatgggagagagggtgcattggcaaacaggccctgcctctcattcttctgatgacagctcagtggataggcatattttctggtagcacatacgatatttttaatgttttattttggaccgtttccctttgagcacagtttcccgtaagtatctcagtgaaagagggaaacaaggttctttttcaggtgggttgctggtgagagacccaagagacagggttgtgtggtccccacacttgcactgagggatgctgtgacactgagcaggcaccctcaccttgccccagatcacctccatctgcaaaatgaggttgctaatgaccatgtggtcctttagtcatgatgacaatggcctgtgaaacatttaggggaaagggctgagtgtcacatccccagaatttctgcctgatatgtaaaaggggagtttgagcagcagagagataaaggcactttttggcactaagtaaaagcaagctaattggttgccaaggagttgggccaaggaaccttattttgagctttatctgtgtgcatcatttttccatgaagattaaaaagactattaattcggtgatagagacatatacaataaattaccatgaaagggccacaatgaccttggccgtatctcattgtaggttcagctttctgggtgggcgggaagcagtattgcctgcaagtcagggttgggagggggtaaggggagctggagtggaaacgaagtagaagaaaatagaatcttggcaacagctacctgggctctcattattttcagtggagcctgacatttgaagcataagaagagctgtcaacaacttcaaagcttcaggggcacattgacaaatgggcccgccttacaatctagcagccacgtcctaatgagcggccttaaaactggtctggagcccaacccccagccccctacaccaggtcagcctgtggaatttagattctcctcttctcttcctgccttcccctccaggagtgggaactggtggtgctggggaagttgaagtggaacctggcagctgtcactcctcatgacttcattgagcacatcttgcgcaagctgccccagcagcgggagaagctgtctctgatccgcaagcatgctcagaccttcattgctctgtgtgccaccggtaagatgaggcttgagccggggagggagatgggggagctcttttgggagatgtccggggagaggcaaaaggccgtaggaactttcattttagttcaggagtttggaggaggggtggtcttgagtagtctaaagtctgaagtttcattcctgggttgctttttctttatctgagctttatatattcgctttctctgctaaactcataaatggtttatgaggacaggtgtggttaaggcaaaaaaaattagtgcctgttaaaatattctttatgatggctaaagtgctctttgaagattacatatactgctcactggttgtgttcaaatctttaatcttttaaggaaaaggatggcttggagataagcccaagaggaaatctcgagggggatgggggcaaatacaggttaaaggaacaacgtcaagataaatatgctgcctgccttgattagtggtaagggagaccaaagaaattcttttttttttttttttactgtagggcatttatggccttctagctgtttgcttctctagctgtttgccccactgggcgcgggagggaacctggttggctttcggtgaggctttactttctgagcgctgggttctgatgccctcagttcatgtggaggtgttttgattttggccgcagcctttaacgttgcaattccgcctaccacgtggatcccacaattgatacatcattcctactggcccatttgttttgtagtttcctaataaaccaaaggcagtggtttgctgttgtcttattaaacagccttggccagtgtctactggttttttgtttttttttttcttggtagtggccatggcagagaccctggaaccttactcatccaagggagagatgtcaggagttcatgttttgacaatcagaaaccttaggtaaaaagctgatcacttgggaagacctttcggtgtgcttcacctcaaatttgccaagagtagttaaatcgctaggtggactcacgtggtaacttttttcaggatgttgttacatgttactggtgagttctacggaacggatgattatataacgtacgatgtagtgcatatgccctgtgctcacagtcaaaaagtcaggctttgctgcatatcagtgagtgacctttaattggctgcttaacctctctgaacccgagcttcttcatctccaaaacaagcctattgatacatcatcctacagccttttcagagcagctaggaaaattaaaatcagaaagaggtgatgcacgtggacgtgctttgtaaaccgaagtgtaggttggaccttcactaattgtgaaaatgctaccatctccgattttcaccctgattttaactgttccgactaaagtggatatgatggctttccttttctggctgcccttacgtgtttctagcaggacctgtgtgttctgcacttgcaggcttgagtgtggagtcctcccggccccctgcctgttcatctagggcacaggtttccccttgctggttttctgtagtcctgttctcctggatgcaggccaggcctcatggcgtgcacatgcgccctgtgccccttggtgggagagtccgttatccttcctgcagccctgggggcggttcttaggacccctgtggacccctgctgccttttggatagtggtcactctggcttccttcccttctgctgtctggcccgggcccgagaggtcagtcctccagtgacctgtcattttgtctcccaggctcggctgtctccttcctctctcatcatgattcactgtgggggaggggtcagccagttctttctctctggcccaaggacagctgacccccgaccctaaactcccccactgcccagctgttgatagccagagctctgctcaacactgtctcttgactaacagatcttttggggtctaactgccccttcctcctctctgatctctgattggggtaggggtgctgggtggagttaccggggtgtgggcagatccccagattccgtctagacccattctcgaaaaccggggatcccatcccccacccgtggccttcttgcccagatctttgggctggctgccagctccggggccagagtagggagcctgggattcagagactgaggacagaggcccagagggatacagaggcagttataaagactgtgttttgggggccttgaactagctttggtcagggactaggaaaggacacccccaaaccacatgaaaatggtgtgctaggcactaagcctcaggcgttgacagggcagagcacaggtaggtcctcggcagtttcctgggtctggaaaggaggggcctgtatcgaaagaagttgctttccctcatctgcacttgggtttgtgcaactgactgagtcacatagaatcctggctgcgtggagttttacaacagtcggcctcacagtacaaacaccgaaggccgcttttcttgaaggaaacaccttccatggagaggcgattgtgcattgtggggccagggtgtgatgaatgggcaaggacccaggactctggccagtagcgggcacagagtgactgagaggcagaggtaggagatgcagattccccaacccgagctgttgccctcacctgctcctcaaatcgcacacttccctccttttctcgcagtcctggatgttccgtcctggagctgatgaaacacctgcggccagggtctcggaggtccacagtgggtggagggtgggggtcccgagagatggccgccaaccctcaggccgtgcagctatttgatgggaaaagctggttgtgaaagagctggcagtggttctgcagtgtgtggggagcgtatttgtgtgtgaaaggggaagggagagcaggagaacatagaggggccgcgtaagtgtggcgaagtggcggtcttgctttatggggctctggattaagatggtggcaaggcggagaggagccctccttccttccctgctcagcctaaaatggcttctggaagagcaagggccgcaagctgctggtatccctctgcagcaggtcctgggcagtgcaggcatgggtgggttgggcgggggatcttcctgactacagctcctagcattcctgttcctggagtttccaaaactggggaagcagaactgagccatagcttccctggttgccgctctgctgatagaacacccaggtctgcaagcgaggaaagaaggccattggagatgacctgggttcgcactctggcactgggagattgttgagatgtgataccatgctcggtggatgattccagttagtctagcagagccaatggcattgagtttacacctggcaccgggtagggggaggtgctcaccctccctctccaggcacccacatcccctctttcttcactagaagcccaccctaagatgctgcaccttggtatttgtgccacacacggtagccacccccaggcctccccacgccaaggccagagccccattgttgactagaacccattgtgctgtcctagccccttccctggctttacctacaggtgttccctcagattccatcgccaagtgagagggagacagtggtggcccagagaagttcgatgacttggcccttgatctagagtgggagatttcgccttgatgggtgctgggaaggaagaatggaaacccgtctttccatctgcaagtctctgagctacccctgaagccgcgaggtcatgggactgagggggagtcgttagcatgccctgtggggacaagcagccaggcagtgtggtgcttgccatcgctcttccctctggctgtaagatgaatgggtagcaggctgctcatcgccctccaaccagccccctccccagctcctcccagcaggccttgcagttgcatgggcattcccttgccatggcagccctgccccacaaggacagggtatgctggtcctcttatgggggtggcagatgaggtgcgtgcccagtgacgtccctggcctgtgaacactctggttctggccctttgaacttccacctgactgcaggttggagaagagagatggggaaagcctgacctggccttccctttcttcttcagcgtcagagtgcgtatctctctccccctattggtgaacagaagcaaagccatcacccctgcaccccaagacctcggccaccatagccaaaatgatgggtgctaaatgtactgggcaggaccatgtattccgtggttttaaacttacttagctctgaactctttatttggtaaaatcctaccaagaagtgcagataccaagttgatgaaatggagcacttctcagggcccatgcccaggtgagggagcccagcgggacccccagaggctcccagggcatccttgggaggataagccttttgtgcttgctggtgccggggctgcggctgggacccaattcctttgattcctgagccagagcgccacctttggggctcttctcccacttccgacgtgaaaggctgccctgtcctcctgagtggtatatgggaggtgactttgaggagctggtcagcttccagtaagttacgaagagctctgcatccagagtctcaaagtctcatccggatcccaggcccaacactcacagtgagtgacatcagccagatcacttcatctcccaagacttcattgattcacctgtaaaaggagatgtttgaaacagatgaatttcaagctcctttttattaatacctcaccatcatcaccgccgtcataagcaagcatgcagcccacagcagagctgcccctggcgcctgtgggtccagctgggattcccctaaggtgtgtcctttgcctccaccattttgccaggagggaggcgggaatgtcgggtgttcctggttatctgggcatcgttccttggctcgggtgaactgcatctcaatgaattgtggaatgtgctgggttagagttgccaacttctctcttccattcgctgagtgttcatggggttcttttcattcccctgtggggctgcactttctcccagttctgcaaagcagcaggaggctttggggactcgatgatgtcatttctgggacacatacacaactggatagtgacagattctccaggaagcacagagccctcattcttcctggcctgcttggcctgctccctgcatctgcctgcaatccagggatgctgggcgcctttctcctcatccctccagacgctggagagcatctccagtcggaactccccaccacagtcctgcaggaagtactaggagtgagagcagaggaggggcaggttggggaggatgctggctgacattcattgcttaccttgaaccaggcactgtgcttttacaaggattattttaagtgaatcctcagaacagcactacaacgtgggtattgctgttgtcattatttgcagatcagaaaatgaaaactcagagaggtcaggtaacttgctcatcttcacacacttggtaggtggtgggatggagattccacctccttctgattccagagctaatactctgaaccagtgagctgtgttctccagaggtctgctttggttggaggggagctggagccctaggccctgggacggcctctgttgcccatggcaaggcgtgtggctgctcctgctctcttcagatctccagatgcagcaacctggagaaaggccctcctgggtctggtggggactggggcaggagtggaggctgcccaagctccgtgcactccacgttccagcttggagctttttgagtctactctccaaatccttcccatctccctgaagagtcttctgagaagtgtctcaaatgctcctcttcactcaagagcctcctttctttttttttttcttttctttttcttttttttttttgagacagtcttgctctgtcacccaggctggagtgcatggcacaatctctgctcactgcaacctccaactcccgggttcaagtgattctcttgcccaagcctccagaatagctgggattacaggcgcgtgccaccatgcctggctaatttttgtatttttagtacagacagggtttcaccgtgttggccagactggtctcgaacttcggacctcaggtcatctgcccacctcggcctcccaaagtgctaggattacactgtgagccactgcgcccagccttcaagagccccctttctttgagaagtttcttcagaagttatccatatagtagtacagacctagccattatagcacaccatcctctactatctaatgcattgatgcccagccttaagaagtctgaatattgtacgttttggggggagtcctccatgctgcctggaacagggaggagcacattgtcatgagtcgatcagaatggatcgctgatcggttcattgcctctctctctgctgcaggaggaaggatctcaggaagtcaccagcatctcacctctccaggtgggcaattaacgatggcgagggcacaccctcacccctgagcgtgccttctgcaccagcatattgcttgttggcatttttgatcaagagacttaacagactgctgagaaatttgtacctggtttttatttgttaaaataatattacgtacaaattttacaaactcatctgtgtttctcccacctaacagaacagcttttattttccgtgcatccttccagttcatccataggcatatatgtatgtatttacccatggttgtaatcttcatcgtcgcatgcatgcatgcaatttggttttccgcttccttcttctgagtggatattgtgaccatttctccatcctgtcatagcgacaaagctgatggtttccaggaatggctgcattgggtaggtggagctttccacagttgagggtgggggttggctaattacagctaggaagctagtgcacagatgaaatgatgtttgatttttttgtttttctctctgttcagtatcccctaccagtagagagggggatgtccttgagagtggtcctggggcagccctggtgccacggggaagtagcgccgctctgtggagagggctgctttgtgaatttgccggctggtagacaccgtgatccattctattgtctcctcattgttcttctccttgggagtcattcccattccagatcctcaagtaagagcaaagtagacctgtaaggcacctgggaggttatcctgcttactatctttaaactcttgacctaagccatgtaggaagaaacacattttataacacaactcaggatacttgtacaagtatatcaaactgatacaaaagtttctccgaacaatatttactcttaacgacatacggtgagcctgatactttctatcctactctatttggttaaaggagaacaacaacagaaagtgctggtcacgacccacaaatgcatttcatgacccattaatgagttgcagctagaagttagaaaaacacttatctcacccaacccgttattagacaaatgggaaaccaagcccttggaaagaggaagtgacttgcccacagtcccacgtctggacctagctggagggctgatgttgcctcagtatttgactaacctggaggagaggtggggcatgctcagggatcccgaggaagatgctcgtcttctgtgtagcgggcaacagagggcagcacggccgccgtcctcgtctccagcggcgtctctcctctggctgtgggaacacactgctcctttggtgccactctgagctgctgagaggcagtcaagttcatgcacatagtgctccccaattctgtgggattggacagtgtccccaagaggactcccctgaaaatcttcttagtaaaacaaaaagggaggtagagtctccctgtgcaaccggtgcacctgttccccctatgcctgctggcttccagaagttcattcgtatgccaataataagagttggttttgctagcagtgggacagcagagatgggcatgtgtgaggtgtgcttcccggtctgaggcctatggcagagggaagggagggccggggatacttgcctgcctcttccctggcagatgctcccacccgggcctttgtgggcccagggccatgggccggctgccccgcttgtgttatgaatgtcacaggggggagctaacgaggttattgggcagagaaacactctcctgtgacccatgtggaagagacctacagcagagcaagaggcagggaggctggctttgtcacactgttcatggcgacagagaaggcgtaggaggggcgggtggacagcaggcgtgggcgcagcaccattatatacgtccctcaagaggtggagatggtgagagggcaatggagaaaaagccaaggagacaggcagatggccaggtttgctctgcgttcatgatgggaggggagggctgtgcttggctcagggatccacggtgtctaacaatgctgctaacttgatgctggggcaatgggctgaccattaaaagagctgctgtagaaagtgtgtttgtaatagagtgtgtacaggaggaaggggaaataggagaggggctggtttttgtagatttaacctgattgtttttgctgtaagttgaagggtgacccacggttccctgtatgctgtgtctcctgcccccacgtgccccttccatgtctacacacagtaagctcactagagcaatgctaaaacgagaaagagtacgctttggaagacttgctgcactccaggaccgtcactagcgtgatggctgcaactatacccaccctaatatctgtcaacacgagcaggggcaacttaaactctcaaaagtctcagggttctcacccataccattagggtgacgctcgtgtgcatcttctgtggctgatgggtaaattaaacaggacgtaatgtgtagcgtactgcatgtggtggtcattggtagctgtcagcagctgtaacaggagaagttggctgtctttatttcccctcgatggaccaagcagctgctggatcatggccacccagcccctctgaaggagtgctcggaggaacacaagggggctggtcttccaagaggagccctctagcatggcagtggacggggttcaagcccctctgatttattatcctcattctgcacttccctgtagcaagtcacatttttttctcttagcaataaaatggggccttcagtctcatgagtcataacatcgaaaccgagtcacccatctgattcggatgcaatgattaatcttcagtgcttagttagagccctatgttagggttagaatcctctgccctaatgttctgagggttcttgctgttgggccagaggttgggaactgggtggaactcagcccccactcgcccactccctgcattgctgcttctctcatttccttttttagatcaaaccttttttttttttttttgggtgggggtcatattaatcctcaatgcctgtccagagactataacaagatcccatctgaattagcattatgcatagattttgcccgtttctcccatctccttgtactttccctccttctcacatctggagcccctggtctgtcctgcttgcatggcccatggggtaccttgtctgcactggtctcaggcattctctgctctgttcccaccatcacctctagaggagactatgactcgctcaccttgctccccccaccagggtcaagaatgttaactcagacatgcttaatatgactgggatctggggattggggaccttgaatcctctgtgcattcattgtgtgcgcttagataagctgtcttccttccctgcctcagtctccttcgtttaatctggaacagccatggtgatggcaaataaacacaggctccttgtgaaagaactcgagggaggacatgcctgtagggcacggggtcactcgcgccgctgacctgctgccgtcctgtttctgagtctctgcagtctcgggagctccaggatccaaattcgttctgtgccctgaccttctgcctctcattccttgcagactttaagtttgccatgtacccaccgtcgatgatcgcaactggaagtgtgggagcagccatctgtgggctccagcaggatgaggaagtgagctcgctcacttgtgatgccctgactgagctgctggctaagatcaccaacacagacgtggtaggtggccaccaccttcttggctaagtccagatgtctcttctcagctcagggaaggagacgacggatttgattatgttgtgtcagaggtatttttctggtttgtttcctaagatcgacatccaagggagtgcaaagttcagcaggtgacaccccctcttaaggttctgaaaagctgtgcacgggaaaatacggaagaaaactcagcaagcagatgaagggggtgggggtgggagggctgtttaccgatgttcctttatggcgtgggcttctcagtgggtctgaattgttgcttcattgccatatttgtacacgctgccaggctgcctctgcccggcagcgaagagctgccgtgtctgctttcacacgctgaggctgtaaggcgcacagaggagaaaggagagccaggactcagctgcagtggatggagcagacacacaagaggtgccccactgtgagaacggtgtccgtccctggcaaacctctcgacccctccccgctctctcttcccttttgttcaatgcagtaatggattacaaagtgctttcaaaagacaaagtgccatacaaactcaagaaactattattagctacggagcttccccattctgtgtgccctgtggacggcccagaggctgttaacttcctgttgccagaatttggagctcctgagaagaaaggttttgagagagaccagggtcaagtgagcctctgaattcaatcagcaggaagctgcagtcctagcccgtccgagacaggatggtgccaagaggtcagagaggccattccttcgttttccacgggcaggacagggactgaagtaaccagccaggagcggggtgggcagtggctgagctggggctagaacccccaggctccgactgccccctggaaacttcccactccacccttgttgccgctcctgggatcttttggtttgaaaaaaaaccctggggtttaaagtcaacctgagagaggggtgttggccctgagccctcatgcatcaccatggagaggctgaagaatgctgggcacttcacgatgacaccctctggatggtccggggggattcagatgccctctgcgggcttttattgagttaagggatcatgtggtttataggcctatggctgaggcctgcacgagggatacgggacaggttaaacctcagagagcccacggctgcagctcgccggcctcctcgcccgcccacctggattttccctggcatttgttcccagctcagagaaatggcgcagggagatgctgacggagcaaatccggggtcctcctctgagatagttcgtagatatggttttaaaatgcgggctccaaacatacgctttttaaacgaggactccagaacacagactgaaaacctccctccagtgcagcatgaagaatgcttttctaatcctccagaggaaaatcgtggacgggacttaacgtttatagaaatggtacgctttcctccttttctgaatgtctccaattaaggctgccttacaaataggactctcagccagtttaagacaagcccttcctcaatgcctggagacaaaaatgtcagtgacaggagttggaagcggccacccccctcctcctgcccccaggcattgtaaccttttcccccgatgttgatagacctgctctgatgggctgaccaccctaccggctccagccttttcccacctccctttgtcccccgttactgatctcacatggacagtggtggaaatttccctcctgggagttgctgctgagtctcttggcttttcgagaccgcaggcaagtcagtccgtcatctcatctggggaaactgtttgcctttttctgatactacgtagccagtccatttaagtcagctggccaactctgttaaatggatatgaagtgggtacgaagctggtttaggggtgtcctcctataaatcctaactgttggtcaagttgatacctcatttctataatgggcacacgccgtgtttcctaactggggctgcctgtgtgtgcctcattcacaccggtggacctgggttgaacatgttcatatttaaaaaccaagagtgaacgcggtgaaatgtacaattcataacactttttcaaagaaaaatctgagccctcaggaagttccaggcttacctctggcaccccggaggctggttcgctctccctgaaaatgtttttagtggaaaggttcaagcagctctgggctaggctgtgtgtgtgtgtgtgtgtgtgtgtgtttatgcacctttccaagtgctaaatctcctcccatccatcagcctgtgttctctgaaaagctgacgctcagagggaagaaaaataaaaggactagaatttagaacacattagtgtttggagggaggtgagttgtgcttcctgagctctgtttaccatttcacgagtcacgaagtggtgtatttccttcattcgtttctggaagtctttactgaaggcccagttgttgctagaagttggggtggatggtggcatctgggaaatagaggatgagattcctgccttcaaggaacttagcagttgtatgatgaagcaagagtaaagcgtgcaaaaccctagcaaattaagaacgtaaacaaaggtgtgctacgtaacgtgttacgaaccctaaatgcagtaggaaatcaacccaaaagaaggagctcatcaggcctaacgtagaatgccggcctcccagcagagaaaacttggtgatagaaactgttcttagagtagagaaacaaaatgtatgggcacgcaatggaatattattcaaccttaaaaagaaatgaaattccgatccatgttataacatgggcgaaccttgaaaatactatgttaagtgaaacgagccagacacaaaaagacaaatactgtatgattccacttataccaggtacctggaatagtcaaattcgtagagacagaaagtagaatagaggttcccaggagtctggggagaggagaggatggggagttagtgtttaatgcgtacggagtttcagtttgggatgatgaaaacaattctgtagatggagagttctgatggccacacagcagtgtgaatgtacttaatgccactgtacatttaaaagtggctgaaaagggaaatttgacattatgtgtatttatgatagtaaaatgtgtgtgtgtatatatgtatatacacacacatacataaatggatatatatatatgtatgtatgtatgtctgaaacattctcgggccacgctatgaaatgcccataggttgatgttgagctcttccctggaaaagtgaaatacacaggaccacattttgccccctggccctagtgcattgacaaacgggaatcaggaagagctgacagtttcccccagagcccctgaagttatatgtcagctcctacacaccttgctgtttctgatttcttcaagcttgcaatgctctctgttactttgggggttaggtcgtgggttgtcggggatcgagctgtggaaagagggtccccctgattcttgtgagatggccaggcgagtctctgtggttcattggccaggagcagatagctttgatatgagggacgcatgcggctctgagaaagtcggcctttgttgctccgtctggttgccaaaataaaccagaacgcttcattccaaagagaaagctgagtgaggggcctgacagttttatagggaataaacgtctcagagagtggtatattttaaatactttttccttccaatcgtaagagttgctaaaaacagccagagaggcagtttggctgtaggggggacgtctattgggggtgtccagtgcctgggtaggtttgagaggggagggtgccactggcctgggtccccggtgaccatggccctgcttccttgggctgaatcggggtcctcttccatcccctctgcacactagtcgggctgcgtgccagcattgatctcactgcttccttgtctatagaacctcttgaataaggcccagcttttcctcagctctttatccagagcccctggcagagtcattgggagtgatgcttaagagaggaagggaagaggaaggaaggagcaaaggacaaaggcaggcagatgggtttccagtgggtttccgattcactggtctgtccatgtcctttgaaaagctgtgtcttttctttaacttcaattctgtgtcagggccttccgagccttctgagttttccccaaccttatcttagagtaggttaaatgaagtggcttcattttcatatgacacagttgcacaaattcactaactaaaaaatggaatggaggctcacaggccataaaggtgttgtgaagttattgcaagatacttaacagaagaaagactctagtcatctgttccttatatttatccttttttgtctaagtcacatcaaaactctttgtcacattctttaaaaacaaaaagcaaaaaacaaaactttagattcaggggatccatgtgcggtttgttacgtggatatatcgtgtgatgctgaggtttgggcttcagtcgaacccgtcacccagacagtgtacacagtacccaatagggagtgtttcaactctcgtccctgtccctagacacattcttaaatattgcccagagaagattccaggatatcccttccttagggtcatcctggcattttacggtcctggttatcaatgagctattaaaaagcagggaggtggaggcgccgtggaagaagtctcagtttcgaccacatgtgtgtgattcatggggtttagcattgtgtgtttctgctccgtagctggaagtgccgccaccctcgccccacatgtcattttcaagcctccactgttacagattctgtcttctgtggactcttcagggcctgtggtcaggaaccttgtgaagtgttgctggaagctgggggtggggaggtggaatagaatcgggggctgatgcctccctctcctgcctcatttttctgtgggcctcatttggtatgcaaggaaataagccaaacagcctgtgaagaaaggaagaatgagatagtttcctaagttgtctctgcctgagttggccgcgggtctggggctcattcagccctttgtccccctgttgagtgcagtgcgtgtgtggtgacaatgaggtggtgcagttacactgagggctaatggtaggagttccgtcagcccattcatggaggcagaggagggtgcagggcgcggagctcgagccagcaagcagaggaagtcagaggcccttgtaacgagctgaagatcacaaacactgctgtgagggctccaggcttgggggcgggggcagccaggagggaagggggcaagggagggggcctatcatcatagaagttggaggtctgcccgaccgccagcgcggtagggtaccacctgtccaggctgacagacgagcattatggcttcccttttaatcagcttaatttggggcatcttaacacaatggctggtgctttggaggctgcaggaaagctgatgtcctagagccgccacacttgacatgcgtgtaacaccttttgattagaggcgctttcgtgtttttccagccacttgggctctgtctctttttcttggagattctctggtctgtatgtctttacttagagcttagaagtcaaggtatataggaaaaaggagttctgaaattggaggcttgccctttctaaagccagtctgagctttcagccagatgtcactgggacaagccacgtcaactctccacgctccattccctagctgggaaacgagggcatttggctatttgatttccagaggccctttggacctccaaattctccaagtctgtgattatttgtgtatgtcttcttataatccagcccctttggaagcactaactccactcttctctcagcttgatcctctaatagaagcaacctggttggatttaaggtggaggtcttcctctctccaggtggctgccctcatctctacccccaccccaatcccatgcattctcctgccctcctgctttgggcaagacccgggcgatgtggagttggcatgtccagttgcaggtatcagcaccactgcaccatctcctctgccttcacttcccaccagcacacagaatttatatgcccttcccaagtccaaaaagggcccctgccatgctaaacaaaggtattcatatgcaaggcatgagctctgtctcatggaagggagaggccaagttctctttccaccatcagagagtagcgttcaacatcatttatacaagacaggcttttgcccttttagtcttgctgaactagaatgagggatttgtgtagtcgaaagtcaagctgatcattgtcaagtttcgtggaagtggaacctgaaggaaggttaggtggagactgcagagagggttagcgtcctgccttaccacaaggtaagtctagaagagggtggggaagggagttcagaattcttcattcatggagtgtacctgccttggtcatccttttatcttccagtcagaggggtcatcagtcaagagctggccaggctgggtgtggtggctcatgtctgtaatcctagcactttgggaggccaaggcgggtggatcatctgaggtcaggagttcgagaccagcctgaccaatctggtgaaaccctgtctctattaaaaatacaaaaatcagctgggggtgatggcgtgcacctgtaatcccagctacttgggatgctgagacaggagaattgcttgaacccaggaggtggaggttgcagtgagccgagatcgcaccattgcactccagcctgagtgacagtgagactccgtctcaaaaaacaaaacaaaagctggccgtagtcaagtcagtgatgatttggattgaaattaaaatgtgactaaagagagagtatgcagttttgtctatctatgaaaccttcctctgttttatgtgggacacctgggcacccactcttggctggaacttacataaaacactactgtgcacgcacatgtcacctcaagtcccgtggctctgaaagtccagtagaagtgacagccagacatcccagtcctccctgtagggttttctcagaactgttcctttaaggtctcaggctgctggaagggagggctgatagcagaaaaagtggggacactgggaactccaaagggaagacgcgcatggcctgaaaccgagttctttcgctttctggagcctggtctccctatgtggagggtcatgctggcatggctggcaatggttaattcaccgatggccatggagtcccaagttggccatattattgcggtaaaagatacattaacccagatgaccttgccgggggccagaatagagcccgtgaggaaggagagcaaggcaggatcggccgggaggcgagagggattttgttgaggagcaaggtcttccacaggaactgcgacttggaaagtattcaccaagggctgtgccatgcgaaaccctctttaaaggaaccgcatcgctacgcctaacgggcatttcttttttaatgtaatggttcagagctattgtctaccacgcctcgtgtgcacacgcacacacacgcaagttccctcagtcagccgagaatcctgccatctcttttagataacaaaagctcttaggccttatgctttgggtaggatttgtcttccatggacaggtattcagttgggaacaagtatatagtcactgcctctatggtatggagatactccgatttagtccctctgcctcttggggaaaaaaaaaaaaaaattgtaaacatccccttcagcagcttctcaagtccctgtacagtggaggaacattacacgtgaacttcctggattcaatggattcttctttgcaagaaaaaaaacaaaacaaaaaaacagagaaagaagaaaatatcaatttagactgttaggtccaacgtttcactcagtgagtgagcacagggggtgacggaggatggctggaatgtggggttgaagctgctgttctgggtctcagctcctgcccatgtaccgtggagtgagcatctcacaccacgatgattctggcatttaagtgaactccttcacacggtgctcaagtggagaaagggctgtccatgtctatcccagcttagaagaaaaactgatggtatgagacttgccattcctctctgatgtagaacctgcctaagggacattccacagcagttctgaccgttgtcactttgtgccttaacccccacattcattttgattctatatttagtattaaattttttagattattaggatttaaggttttcaaacatctactgaaatgcaagtgcccctagaaacattatactttcaggccgggctcagtggcttatgcctgtaatcccagtacttcgggaggccaaggcgggcagatacctgaggtcaggagttcaagaccagcctggccaatctggtgaaatcccatctcaactataaatacaaaaatcagctgggcgtggtggcacgtgcctataatcccagctgctcgggaggctgaggaaggagaattgcttgaacccgagaggtggaggttgcagtgagccaagattgtgccattgcactccagcctgggcgacagagcaacactctgtctcaaaaaaaaaaaaaaaaaaaaaaaaaaacagaaaagaaaagaaacattataccttaacttttcgcacctagtgagtgataacctatgaggataatgctgccacatggtccttgagggaagaacttggggaagagccgaacagggatgaggcaggtgagccccatgtgatttatcgtcattcattcagctcaacaggtcggacagggtaagggtaagggatgtaaccaggagatgccacaggaacgtctgagaggtgttagcaagtcccagaggccagcgcccgactccatttcagcctcgttcagggtggcacggagactcctgctgctgcgtcacgtctgtcatgttcagcactcttcccagacacacagtcttgactaaagattgtcaggatcttgacacacgcttcattagtcttgactaaatgcgaatctatacctcatttcaaagaaatctgaattctttaggttccaggaccagtttattgttatacataatcacgatcatttattgagctccacttagcactgcacatatatcagtatcatctcagttgccctttactctgattattttgtggggaaactgagatcagaaaagttaaataacttaggtgccacctgcaagtatagtgggtgggcagcagataccacccttcctcatttcattgttccaggtgatatttcgtctctgcctttggcctttagtctgtggttgttcctaatcttagttttcattgaaagctgtagtttgaaatgtgggatagatgagagataggaaaggaaaatttaggggtatggaaattttgttccttagtggttagttccagctttattttgtttatttatatgtttgtttttaaagatcgggagcttgctgtgttgtccaggctggtatcgaactcctggtttcagcttcccgcctcagcctcccagagtgctgggattacaggcatgagccaatatgcctggccagctgtgttttagatctttgggaaataaagagaatgcttttgggcttggcaaaatagaaacctctgggtggggagaattgcacagtaaaagaaacaaaagggaagtttatattaaactatgaaaagacacagggaggttcaatttaacatatttgccttatgtatgtgcttcttaagagagtgcacaaaggcacctttgcagaggagagaggctagaaaatgcccgttagaagcaagtctacggtttgcaccctcttactagcaccagcaacggtccctgtctagtgatacccatgacttgtcattgcattgcatgtcatctgcctaagagaagctcctgcctggggcagacacactgtcaattacccctacaatatagactgatactaaagcaaggctgcatattcttgcttattcccaaattggatggctcaaggttccagaatgttgtagacattctgcattatatctttatgagagttaaggaaatggtaaagaagcagaaaaagttggggatttttttttttaagtatttacagtgaggcgcggtggctcatgcctgtaatcccagcactttgggaggccgatgcgggcggatcacaaggtcaggagttcgaggccagcctggccaatatggtgaaaccctgtctgtactaaaaatacaaaaattagccaggcgcggtggcgggtgcctgtagtcccagctacttgggaggctgaggcaggagaatcgcttgaacccggaaggtggaggttgcagtgagccgagattgtgccagtgcactccagcctgggggacagagtgagaaaaagtatttacagtttatgtgagggtcagtacgttggttcattggcttccttcttatctagttctcgggctgagtttgctaatgtcatagcacttctagtagccttccccttttctctgccacttcccagcttccccaggcagaaagcatctggtcggccccttgattaccaggcatccataagtgaccatcatttaggccagtgcttctcagaatgccaatcacctgggctccactaaaaggcaggttctgaatagctcggcctgggttgactgagattctgcggttccaacaagctcgcaggtgatgctgatgctgccagcccatggaccccacctggagtagtgaggttccttggcactttaagaacatccctcctttacttcacatttatttctactggaaactagcacagacttatgcaagctaaattacgcatgttttctccgtaggatgctctatgtcctgttcctcttactaacaactctggtctggaccattgttctaggattgtctcaaagcttgccaggagcagattgaggcggtgctcctcaatagcctgcagcagtaccgtcaggaccaacgtgacggatccaagtcggaggatgaactggaccaagccagcacccctacagacgtgcgggatatcgacctgtgaggatgccagttgggccgaaagagagagacgcgtccataatctggtctcttcttctttctggttgtttttgttctttgtgttttagggtgaaacttaaaaaaaaaattctgcccccacctagatcatatttaaagatcttttagaagtgagagaaaaaggtcctacgaaaacggaataataaaaagcatttggtgcctatttgaagtacagcataagggaatcccttgtatatgcgaacagttattgtttgattatgtaaaagtaatagtaaaatgcttacaggaaaacctgcagagtagttagagaatatgtatgcctgcaatatgggaacaaattagaggagacttttttttttcatgttatgagctagcacatacacccccttgtagtataatttcaaggaactgtgtacgccatttatggcatgattagattgcaaagcaatgaactcaagaaggaattgaaataaggagggacatgatggggaaggagtacaaaacaatctctcaacatgattgaaccatttgggatggagaagcacctttgctctcagccacctgttactaagtcaggagtgtagttggatctctacattaatgtcctcttgctgtctacagtagctgctacctaaaaaaagatgttttattttgccagttggacacaggtgattggctcctgggtttcatgttctgtgacatcctgcttcttcttccaaatgcagttcattgcagacaccaccatattgctatctaatggggaaatgtagctatgggccataaccaaaactcacatgaaacggaggcagatggagaccaagggtgggatccagaatggagtcttttctgttattgtatttaaaagggtaatgtggccttggcatttcttcttagaaaaaaactaatttttggtgctgattggcatgtctggttcacagtttagcattgttataaaccattccattcgaaaagcactttgaaaaattgttcccgagcgatagatgggatggtttatgcaagtcatgctgaatactcctcccctcttctcttttgccccctcccttcctgcccccagtctgggttactcttcgcttctggtatctggcgttctttggtacacagttctggtgttcctaccaggactcaagagacaccccttcctgctgacattcccatcacaacattcctcagacaagcctgtaaactaaaatctgttaccattctgatggcacagaaggatcttaattcccatctctatacttctcctttggacatggaaagaaaagttattgctggtgcaaagatagatggctgaacatcagggtgtggcattttgttcccttttccgtttttttttttttattgttgttgttaattttattgcaaagttgtattcagcgtacttgaatttttcttcctctccacttcttagaggcattcagttagcaaagaggttggagcaacaacttttttttttttttttgcacaattgtaattgacaggtaatgaagctatttgttaaaatatttgcctttttaagtaaaaaagaaaaatcagaacagggctatttgaagaattattttatacacagattctgccttgtttcatagtatgagggttgaagacggaaaacaatctaagggtctctcatttttttaattttgttttgttcagtttggtttttttttttttttgcgctgctaagaagctaaagtcatccatccttattcacgttgacagtacctagctgtaatgtttcacagagtgtgctgctattttataaacatttttataatatattattttactgcttaaattccaagtcctgaagtagatggttgagatatgagttcttcgtactggaaaagcccttccgtagtttgttttcttctggtagcatattcatggttgtttttttttttcttttttggttttttggttttttttttttcctctgatcacattcttcaaagacggagtattctttacctcaggtttactggacaaaatcaataactacaaaaggcaatgattcacgcttttgttttcataatacctcacaaccgtacagtttctgcttgggagcccattcgcatgaggaatacagaagcagtgtgagcagggctgactccctctcaggtggaaggcagggcggtctcactcccagggacctttttggtcatggaggccatcgggctcccagttagaccctggtatcctcatcatgatggaaaaaatacattgaaccaagggatcctccctccccttcaaggcagacgttcagtacaaacatttatgcggtaggctcagatgtcgtaatttgcacttaggtaccaggtgtcaggaaacagactaaaaagaattccaccaggctgtttggagatcctcatcttggagctttttcaaaagcggggcttcatctgcaaagggccctttcatcttgaagtttttcccctccgtctttcccctcccctggcatggacaccttgtgtttaggatcatctctgcaggtttcctaggtctgaatctgcgagtagatgaacctgcagcaagcagcgtttatggtgcttccttctccctcctctgtctcaaactgcgcaggcaagcactatgcaagcccaggccctctgctgagcggtactaaacggtcgggttttcaatcacactgaattggcaggataagaaaaataggtcagataagtatgggatgatagttgaagggaggtgaagaggctgcttctctacagaggtgaaattccagatgagtcagtctcttgggaagtgtgtttagaagggttcaggactttgtgagttagcatgaccctaaaattctaggggatttctggtgggacaatgggtggtgaattctgaagttttggagagggaagtggagcagccagcaagtaagctagccagagttttctcaagagccagctttgctcagcacactctcctgggccccaaggagtcccacggaatggggaaagcgggaaccctggagttcttgggaatcttggagcctaaagagaaaccgaggtgcaaattcatttcatggtgactgacccttgagcttaaacagaagcagcaaatgaaagaaccggacaaataaggaagggcacaagcctacccgactctatttacagtctgtaactttccactcttcctgtagtcccgaggcccctgggtccttctagcttttctctttcccatccttggggccttgtgtgatgatgggtgtggggctgccgatgggaaagtcgggggttgttaggcttttctgcctgctcctgcttaaacacaagaaggaatcctggattttgccctctccttagctcttagtctctttggtaggagttttgttccagaggagctctcccccttggatttgaacttgctctttttgttgttgttgttctttctcttctttttcttacctcccactaaaggggttccaaattatcctggtctttttctaccttgttgtgtttctatctcgtctttacttccatctgtttgtttttttctccatcagtgggggccgagttgttcccccagcctgccaaattttgatccttcccctcttttggccaaatcctagggggaagaaatcctagtatgccaaaaatatatgctaagcataattaaactccatgcgggtccataacagccaagaagcctgcaggagaaagccaagggcagttccctccgcagaacaccccatgcgtgctgagaggcgagctccttgaagaaggggctgttcttccaggaggccttattttgaactgcctcaggaccccactggagagcacagcatgccttactactgggtcatccttggtctatgtgctctgtactggaggctctgttctgcctcttatcagccaggtcaggggcacacatggcttaagtgacaaagccagaggagaagacaaccctgacagcatcacgctgcatcccattgctagcaggattggcaactcttcagacggagctgcgcttccctgcagtctagcacctctagggcctctccagactgtgccctgggagctctgggactgaaaggttaagaacataaggcaggatcagatgactctctccaagagggcaggggaattttctctccatgggccacaggggacagggctgggagaagaaatagacttgcaccttatgtcatgtaaataattgattttctagttcaagaagataatattggtagtgtgggaattggaggtaggaaggggaggaagtctgagtaagccagttggcttctaagccaaaaggattcctctttgtttatctctgagacagtccaaccttgagaatagctttaaaagggaaattaatgctgagatgataaagtccccttaagccaacaaaccctctgtagctatagaatgagtgcaggtttctattggtgtggactcagagcaatttacaagagctgttcatgcagccatccatttgtgcaaaatagggtaagaagattcaagaggatatttattacttcctcataccacatggcttttgatgattctggattctaaacaacccagaatggtcatttcaggcacaacgatactacattcgtgtgtgtctgcttttaaacttggctgggctatcagaccctattctcggctcaggttttgagaagccatcagcaaatgtgtacgtgcatgctgtagctgcagcctgcatcccttcgcctgcagcctactttggggaaataaagtgccttactgactgtagccattacagtatccaatgtcttttgacaggtgcctgtccttgaaaaacaaagtttctatttttatttttaattggtttagttcttaactgctggccaactcttacatccccagcaaatcatcgggccattggattttttccattatgttcatcacccttatatcatgtacctcagatctctctctctctcctctctctcagttatgtagtttcttgtcttggacttttttttttcttttctttttctttttttttttgctttaaaacaagtgtgatgccatatcaagtccatgttattctctcacagtgtactctataagaggtgtgggtgtctgtttggtcaggatgttagaaagtgctgataagtagcatgatcagtgtatgcgaaaaggtttttaggaagtatggcaaaaatgttgtattggctatgatggtgacatgatatagtcagctgccttttaagaggtcttatctgttcagtgttaagtgatttaaaaaaataataacctgttttctgactagtttaaagatggatttgaaaatggttttgaatgcaattaggttatgctatttggacaataaactcaccttgacctaaattatctggccgtttttgacttatttataaaccagcagtcctcagaatggaatacacttgtctcatgtcagaactgtttcatgccgctgcaacatttggcagtggcataaaagacacattctaacctggaatggaatctacatgtgcctctgtgttatggcggtacaagtcattgttgacattgctaggggacgaggggtgcctatgcagccagcttataagctagaagcctcagtccaccttcagaaggtgggtacatcacagacactatgactggtcctcagaggatcgtccctgattgttgccagctactcattctgggctgtgaggaagcatctcctggcatgagaggtaccagaagcctgcggtgccatctccagagtctagggagtctctgggaaccctgcccctgcagctttcctggctcctgcctgctgttcttcgtggctcccacctgatttctgatccttcctgcacccctcttctgagacacaggccacaactacctttgctggagtctggagaagcagagcctgggaatgggatgtgacagtctccgtactgctgaaatgaattgccaggccctaggcccagctgctcttggaccttagctcagaccagcttctttcccgagagtgatgggtgtgcagaagacaagggcctaatgaacacttttttgtgtgttttgtttagaaacagggtcttgctgtgtcccccaggttggagtgcagtggcacaatcccagcttgctgcagcctcacactcctgggctcaagcaatcctcctgcctcagcctcccaagtagctgggattacaggcgcccaccaccacgcccagttaatttttttattttttgtacagattttttgtatagctttgttgcacaagctataacagacattttgatgttactgtaaaattaattttttccaaagttccttgtctggaagtcatcgaaggctgttttccattttaattctgacctgagttgtaaacaagatttaaaactggccgttggggaagtccagattaagatattccaggctgatctcaagtaacttcacttaataggacttttaagcttacaaggaccctagaaattcccctttgttcccattccccttgacatccgccattcttagcgacaaatgggggtaacttttttcttgggtttctgcctagtgaagtctgctggcctcctgggagtttcaagggcctctggttgccattcttaaccatccttggaattctctttggcatgacataatgtccaactgggttcctctccctccctttccctatctttttgctctgtaggatcaatgctatatctgtttatagcatgacaactccactccctctctcaaatgccacccagcaacactgctgggcttcccccattctgaacaatggatgttttaagggcgggaagagcagatgaagcacacagccgagcagtgagaaatctgactgtcccatctacgctctttcagacccagatcat

SEQ ID NO: 96 - DNA, 142813 bp, Homo sapiens
  source 1..142813: mol_type = genomic DNA
ggacatcctgtggtctgcgcgtacacatgtgacaggtacgtgcacgcccacatacaggaacacacagaggcctttggaagccagcatgggcagacaggccctatcccaaagcggccggcaggcgtctcctaagaatggttctcggacacacctctgaaaggaaaatacaactcggcaccgcagttgactcggccaaaggaaaaaaacttaagctgaaagctgaggcctgcccgaaggagcctttcctgtggcgcctgagccgagggcttcagggagagggccgcgcatcgcagcgcagccgcccgtcttcccgtggcttccctacggccgcggctcccgctgctcctttccgccggccacgcgggtcgcacgaccttcccctcccgcccaccctgaggcgctgaagccctcgacgccggcctcgggaaaggcgcggccaccgcccgtttcggattcccgtttccttcctccgggcgcgtccttcaccgtggccaaatcagcctctcaactgctggagcccggcctcggacacttctcggcttacgccgccatacagtggcgcaccccgaaaccccggaaccgacagctcggctggccttgcgcacccacactctccaaggcagggctcggtccgggggctggttttgccaaggcgaggggcgaggggcagcccaggcggccggatggataccaagagggcgcgtcagctccggcgggacggggcttccagggcccgggaggggtccaggactccccgccggcgcctggctgtcggcggagggccgcggggcaggagggagtggagactgcggccccagttcgggcagcgcggagcccacccaacgccctcctcggccctcggctcttcctggggccatcccgcccctgcacctcggcctggcacctttccggttagcctcggaggccgtggccgagcagggtgcgttcgcctggctggggggcctcagaacgttatttccgggtgacaacctgcagggccttccgcccctcgcgacctctcgggagtcccttccccggcgcccccccggggctgcaggggctgcaggttcggtctcggggcctccttaccgcagtccgcccggctttaggctagtgggctttaactacgtcgataatatgactccggcgatcttgtgcggcgatgggatgcggccgtgggcggtggagtccaggcggagtccgctctccacacgcgagggcgcctcctcctcaccgctcgccggcttcaaagctcgcgcctcaggcgacggcagccaacgggttgccggctggaggccccgccgacgccccgccccttgcgtgcccacccgcgccccgcagccccgcccccagcgccgaccctaagtttcggcgctcagtggtccggcgctccccaaggctcggtgtccagcgtcaaccccgaggtctctatgccccgcctcccgacgccagggggcagggccagcgcgctgcgcgtcggggcggggctttggctgcgtcggccgcgtagcccgcgcgcggagcgtaccctgctgcggccgttggccgttagcgcggcttcggcggttgtcttggagaagcaagatggcggcgacggcggccgcagtggtggccgaggaggacacggagctgcgggacctgctggtgcagacgctggagaacagcggggtcctgaaccgcatcaaggtgaggccggaggctggggccgggcctggcggatccgcagggcttgcgtggacagcgggcgtcacaacggtcgcggcgaggaggccgcctccctggcgagggaccggggccggcgggcactgggggcgcgccccggcatggcctccgtcctgcccgccccacagagggggtcggctcgttcgttcgtgtggtcccggagggcaccgcggactgggggtgcctggcccatcccctgcctcattccgtgggggcgggaccgcggggcttgggggccacacgggcggcccgcagctgggccctggagtgcggccccagcgtctcttcctcaggctcgggcatgatccgcggcgggaaagcagcgcgtccagccgaagcctgggggtcggagagcttgtgtgactgagaacgtttcggaaggcgtttctgacctttgcacctgccctcccagctcgttggcttgctcgtgtttgttgctggataaatgtgagcttgttgtgaaaattgtcttgaaattataatttcctgtttcttaacttttttttaaggctgaactccgagcagctgtgtttttagcactagaggagcaagaaaaagtagaggtatgaagtttccagattttaacatggctgtattcgttaatacttaatttcttattcattaaaaaccgtcttaaaaatagtttatagtaacatatagctagggataattttgaactgttaaggattacattactattgagagagagccaaaattattcttttttcgtgtagcttttgaatttgggggtaatcttaaggtaccacagtaactctgatactaatgcttaatctgaaacaaatggtcataggagtttcttgaagaaatggtgccattgtcaatgtgttaagtgcaggttcactcagatcctttagtaagctaatatgttattaatccctatgaaacggggtatatagtatgcaacttttcccaaaattatctgaccactcaattattttgacaatgaaaaagacagcgattattttaaaagtgcagccactactctatatttaagtgggtaatttaactttttcggagtcccaccaaccatcctgagtaaatattctggaatttgtcaacaagaatagaaccatcatcaaagccttaaactcttgctgtatgacaaatcagtctactgtcctctcacttctttagacctgtatacctaatctctaatttcatcaaaatcttcagttctttgccctttccatgtctgtgcaggcatcagtcttctcttggcagcattttgctctggaccctatgggtctggacccctaattaccttgccttaacggtcatacgtggtctggaagaaatctcagtggtcatttaacccagcaaactaactcttcccactttgcacatatgtgctcttggagaagagtcagtcaatcctgtggattgctgatgttgcaaattggcaggtaccaacctggttaggtcctgagcaggcccagcagctctcttcttcaccctagctgtgcagtagccttctatgtcacccctgcttccttctctctgaacacatggtcttgttgcttcctccacagggaaggtagaagccattagatcctaactttatgtcctcctctcctgtccctcaatctattgctcacctgtgaaaatgcttacctgtgtctatgtttatctgtacctctttccttactgctttagaagaagaggctctgtcctgtccaagaataatcactctgtcttgtgtatactttcaagtctttaattatttactgtatctttgaccccttccttttctgatggcttttcttttgagcttgaaaacatgtttaaataactattaggagtaaactgttttcctttactcacattctgcttttaataccgctgtggtttttttccttcacaacctggttttgaccactccttggtttctttagcatgatctttttcctgtacacctgactgagacttatccacagttgtcattctgtactgtctcacagactgaccttattcatccagtaactccagccctgtaactttcatgcatgtttctttcccgagcttcagacctgtatgttaaactgcccactgtattatgcccttaatgggaccatcatttatctggcaagaaatctaagcgtttcttaggccttgctcttctttccacctgctcagccatcacctggctctgtgtctgtcaggtgtgtatctgaagtgtccccaagggagtgctctgctgcctcctttgtgcttgtttcttcttttccagattgccttatccccttcctacttgccagtctccgtttccgtggtgtccctcaccatctccctgaagtcctttttccacattgctcctagattggctgtttatagtacacatctgatctgtccctccattctcttaaaatatttcagttgactccctatcttagaattccctgaaccagcctaccaactaccttgaggatctctcctctccttgtcttttattttaacaactttattgaggtaaaattgacctatagtaaagctaaagtatttaatatgtacaatttgatttttaatagttaatttatgcagctgtgaaatgatcatcacaatcaaggtactgcgcatatccttcaaacttttgaccttcaaaagttttccttgtgccccttatgtaaccctctcccccaccccaaacctttttaagaattatataaatggaatcgtatagtaggtactctttttttttggtctgtttcttcaacataatgcatttgaaattcattcatgttgtggtatgtattaataaatcatttcattaatacattgtacagatatgacagtttagccattacctgctgacagacatttaggctgtttccagtttttgagtattacaaataaggtttctgtgaacagtcacatacaagtctttgcttggatctgtgatttctcttgagaaaatatgtagaggtgaagtgactaggtcacatgctaggaatatttgtgacttttaagaaacactaccaaattgctgtccaaactcgttatgccattttgcattcccatcagcagtgtatgaggctgccactgtagcagcaattaatgtggtcttaaggaagcttaccatgtgctacctactgtagcctcttctcagcaacaatcacaggcttgatggtctagaagtattttttccatacttattcaaataaatgtataattacaaaaataagttggcctatgggccgcataagatcatctcacatttcatggataaactgggaattacaagtgtataattaaattcctgttcatagtaagtatgctataaatggtagatacctgagatgacaaaacttttatcaaacttcatgtatttgaaataataaacagttgttgacatttaattgtatttcacacaggtatttgaaaatatctagcttcaaaagcagtttataaaacatttaaaaattaaaaatacaaatcttcatatatggttttgttatattaactttgagaaattactaaatagcacaaagtaagtcctgtagtaattaacagttgtagaatggattttgtaaaaccataattttatcaatgaaaacgttaaactttatattttgtagttgtttttagggtaaacacatgacacttaaatttttttttttttaacagaacaaaactcctttagttaatgagagcctgaaaaagtttttaaataccaaagacggtaagatgttcagtttgttcttgtttatctatctctgaatttttgaatcttgataccatttgggagaaatcaggaatttcagggctttttttttgtcttcaattgttataggtcctcattttaaaataatattttattgtacaacaatcgtgttgctattacatatttttggatttgggatgttgttgcttaaagccagttttactacaaaaagccaatattaaccattaaaaagcgaaacactgaaatctatgagatgattgtcttacagttagttacagactgatgatcccagtgaaaaaatcaggagattgagattttcattacttaatcatattattcaaagaggaaatttgtaacttaaaaaatttagaaacctttcttccattaatttagtgtatctatttcataatgttaatttaaaaaattcagtttttgaagatttgcttacttacctttttcttgatctttataggtcgtttagtggctagtcttgttgcagaatttcttcagttttttaaccttgactttactttggctgtttttcaacctgaaactagcacagtaagaataatgatttttacatctatcttttgaaacctttgatacaaatgagttaatattaagctgaaagttaatagaatttgacaactgatagttttttacatttagattatttttggtagttgattatctgtttttcttaaaagccatatgagctttcagatagctggcaccagtgttgctgctttgtgttacttgaaagcttgctaataaaagtgttactatagagttaattttgatacgatgttagagtgcacctgttaatggaaacgttgaaggtagaggctctgtaaaagaaataggcataattttttaaaatagacatttcattcattagtaagacagtctctttgagtttaaagatgtctttaaactctgaaaatatcttctttactccttgagaataacttctgctatttttttgtgcacttgtattttaacttcttttctagctgcaaggtctcgaaggtcgagagaatttagcccgagatttaggtataattgaagcagaaggtactgtgggtggacccttattattagaagtgatcaggcgctgtcaacagaaagaaaaagggccaaccactggggaagtaagtagaattctgtgttatctttttctattttaattattggctgcttagtttagccatgcagattagtgcatatatagtaaattaaggttttcatactagaagatattccttaaaaacaaaatgagatgcattcagattgtatcaatgcaaattttaatgaaaattaggaatgtgctgactgtgattctgtggcatatctgttctggtttttgatcctcaagagtgttgggtcatgagctaaactgtctggaacaaatcccaactcctcgttgcctcacttgatcctccattcattccatactgtgtatgaagtgggctctaccaggccctaccttggtgttctgaggcttctctgcataagccaacagaagcactcaacttgctattatttttattaaaacatcttatttaaatataaaagggctgatttataggatagttaataaatttttggacttaaaggcctctttaggcttaaaactaagctgttgattttgctttacgctgtttagaaacagttcaaacttacacttttttgatcagtagtacttttcatactcttaacctttttttagaaattgtgctaatgagattaatgatataattttattttcatacattaattttacatgaagatactctgttttatagatacaggtaacatctgtaactgttccagatatttgattaaatgtgagcttttagtcagaaatttataggtaagaatgtggagggctgtataggtttccagttattttctttggtgagtctcagaggatgttttctattagaatttttgaaaattgataaagcttgcctgagtactaattatgtgtaaggcatggtaaatagactttgtgggtactataagataaaatataagaaacttctgtgtctctgaatagcgcagagctatttaagataaaatgtgctcaaataaggaaattaacatttaaataacagtttaagattatggaggaattgtcatttaacacattatttccaaccatattatgaatagtttagaggaggaagcgattgtcacatgccaaaattttattgaagtcaattttaaagtgagagtaggatgtcagttgtggggcgaggattgggaagggctttccgagaagttggaacggtgccagccaagcgtgggagcaggagagcatagccagatcccaggctggctgggagtgaggcggctcacccagagcgcaggttgtcacttcagcttgtgcatataatttcattccttcatttatcaatatccagcaagcttttattgtgcgcttatttgatagatactgtgctgggtactgggcaatcaaaaacaaactaaagaacccagtctcctggggccagcagtctgtaggtcatgatgacctctctttattggctttcccctctcggcttctgtggccctgaagaactctcttctctttctaactgccctttcattttcttttctgtttagtagttgtgctttggctcacctcattgcagtggtgtttatgcatatttttctgtctagattgatctttcttccttaacataccactagcatggactctggaaccaggttacttgggtgaaaccccagctctgctacattctagctctgtgagcctgcagtcactcagcctccgtgtgcccaggttccttatctgcaacatggagatcacagaagtatcgcgcctacaggtctggagggggtctgaggaagcaagatgtgtgaagctttgagcacagtgcttggcacggaggactctgtgtgttactgtagtaggcatcagtggattcaattaactgcgaattgaaaatattcggataggctgagcgcggtagctcatgcctgtaatcccagcactttgggaggccgaggtgggcgaatcatgaagtcaagagatggagaccatcctggccaacatggtgaaaccccatctctactaaaaatagaaaaattagctgggcgcggtggtgtgtgcctgtagtcccagctacttgggaggctgaggcagaatcacttgaacccagtaggtggcggtggcagtgaggcgaggtcgtgccaccgcactccagcctggcgacagagcgagactccatctcaaaaaaaagaaaaaaagaaaatatttggataaaatacaacaaaagaatgcaaatatagtagaaaactatttatatagcatttacattgtattagatataagttagacacgatttgaagtacataagttatatgcaaatatgtcatttcacataagagacttgagcatccttggattttggtgtccacaggagagtcctacaaccagtcccctgtggatactgagggacgactgtgttagtattactgtttcttgttattgtatggatgactctttaagttcagtgtagtctgcctaagctcagctcagtcctttatcctagctccagactagaatttccagctcttcacaaaacatacctccctggataacccaatagtatattcgaatcctgtgtggaaaaacttactttcttctctttacctctaaaaagtaaaaacataaagacaaaagcaaatcccaccttactccccgcaaataaccctcttcaagttcttcttgctcacttctgtgttttgattgattctattcctgtgactccttggtttcatcccaaggagccacctcttcacatgtgctctggattcagttcttctgtcaggaaggattcactctccaccttgcaccccgtagctttggtaacaggctgtggaagaaagaataattgctggagggctttctgttctctgctagataggagtgtacctcaaaatgagacccagtagcatgcctgtgtagtgggtgtgatgtgaaaatggacacagaatcactgttcttcagtacttcattctgactcgtggatttgaggcctcccctgaagtttgccctgactttttcatagctgtgattctgtcaaatagagccaggataggaattctgtatcctcaaaaggtagttgttttactcccccaagttgctgaaccagtaagttgggcatctcatctccattttttgctagttttcccttcctaatatctggatatttaattttaatagtttgtgcatatgtatataaacaaatagataaaatatttaaaatagagacctcaaagatgtatgttttggcccttcattatttattagtgttttctattactttggaagaaaacctgttgtttataatgaaataaaaaattagagcttttattagcttttgactttgactgtagaaaactagctataggttaagctcactgaactaaattactgatgctttttaccaaaactgcattttaaccacctcaagaatcaggttgctgtgccccacccgctttaacctgacttttgtttggttttattggatgctcccaagccgtagataattaaagccctttcttgttttctgagcccctcaatggatcattttcatctccttcagcacctctaccatgtaggtccttatatctgtccaggatcatttcttcctaaaggttctcatgctttcagtctgtcattcactgttgcagaattatttttaaacttcagcccttcctctgttcctttcttctgtacgattgtagtgactgcactgccgactcaggagtcccagattcttcagcccttatgaaatgttctgtgtgatgtggccttaacctgtctttctagccttatgtgttttttttttttttaatgtggaaccttgtacttaagtcagattgaactttggacttactacttgaaagtggcttgtgttttttcgccttctcttatttcgttattctatcctccacttggaattatactctttccccttccccagctgtggaattttgtcagtcaggttttctcctcagctgcaactcttgttcttcctctctccttactggaaactgcatgtaacttagtgcctccttctgtcaaagttgtagtagtgatctgcactggttacacatggaaatttactgaggacaagggctttatcttcatatctcttacacagtctaaggcattgtgatttttttttgtttttttttgagacggagtcttgctctgttgcccaggctggagtgcagcggcaagatctcaactcactgctgcaagctccacctcccaggttcacgacattcttctgcctcagcctcccgagtagctgggactacaggcagccaccaccacacccggctaattttttttatttttttatttttagtagagacggggtttcaccgtgttagccaggatggtctcaatctctgacctcgtgatccacccgccttggcctcccaaattgctgggattacaggtgtgaaccaccgtgcccagctggcatagtgatttttaacatactgttcacagtcagtggaagcctttgaaaatttgaagaggaatacccatttagaagatttgtggaggttagattggtaaaatatggagaagttagcagactagaaagaagtgaaacacataagaaggcaaatctagacaagaatggtagcagtaagaatagaaataagtggacatacaggctagacatggtggctcacacctgtaattccagcactttgggaggccgaggcaggcggatcacttgaggccaggagtttgagaccagcctggccaacctagtgaaaccccgtctctattaaaaatataaaaattaatgttgggcgcggtggctcatgcctgtaatcccagcgctttgggaggccaaggcgggtggatcacctgaggtcaggagtacgagaccagcctggccaacatggtggaactccatctctaccaaaatacaaaaaattggccaggtgcggtggctcaaacctgtaatcccacattgggaggctgaggcgggcggatcatttgagaccagcctggccaacatagtgaaaccctctgtctactaaaaccacaaaaattagctgggcatggtggtgtgcacctgtagtcccagctactcgggagggcgaggcaggagaattgcttgaacccgggaggtggaggttgtggtgagccaagattgcgcctctgcactccacagagcgagactctgtctcaaaaaaaaaaaaaaaaaaaaaaaaaaaaaatacaaggaattagctgggcgtggtactcgggaggttgaggcaagagaatcgcttgaacccggcagtcggaggttgcagtaagccaagatctcgccattgcactctaacctggacaacaagaatgaaactccgtctcaaaaaaaaaaaaaaaaaaaagttagttgggtgcggtggtgcattcctataatcccagctacttgagaggctgaggtgggaggatcacttgaatctgggaggcggagattgcagtgagccgagatcgcaccactgcactccagcctgggtaacagagtgagaccctgtttcaaaaaaaagaaaaataaaagaaagaaagaaatgaatagataaagatgaccttttgagaatcaacaagacttggtaaactaatattttggcatggggcaaggtcacagaaggcaataagagaaaagaaaagctctcaaaggccagtttaaggattttagcctagaagataatatcaccaacagaaatagtgggactgaagagggagaactgaagttatgaagaacagcacattttcgtatttaaaaagttacagtcagtcataaagggatttttgtaacaaacagccagtatttactatgtacagtgtcctagagcttgtgctggtagtggatgaattgtaggaagtgattttcatttaagaaacattttaaaaacctcctccttggcattaaccacagtgctcagaaccctgtggtgacagggcactgggcagcagacacagatgactcctgtggaagttgggctagaacaggtacttaccattttggaaaaaaaatgtgtgaaagtagaaaactgggagagtgaactactatttgaaggggtaaagtatttttaatgaaagttgttatttggtattttttcttgagataaaatgaagtagggaaacaaattcaaggagggcaaaaagtagatcttagagaattacaggatattatttgtctggagagtagggagaagggaagtgaggaagtaaatcctggaatggtagacctgggacagatttcagtggagaaagacagtatcctgttcaaagtgaataaatgaaatattttgcaggtaattagaatctagggatgtgtagaaggtttttgagggggtaaaattagaggaaaatctaaaaaggatggttactttaataagaaataaaataccaacattgtatagtgtttttaaatgctaaaattctattggagtgtaattggtatatttgtgttttatttttaaatgtattttaattttaaactaaaatattttagggtgcacttgatctatctgatgtacattctccaccaaagtcaccagagggaaaaacaagtgcacagacaacaccaagtaaggtgagttagctgtggaacacggaagtcatgtctggacttaactccagagtgctctgcttttctctctctagtctttcttgttacaagttgtattgttttatataaacacatgggctctttagtttcttgaaggtgctttttttccattaagtatacattaaaaaaaaagttttgctttgttggtagttgtttgacatttgtattgtagaaaggaatgtgctggtaagtaacagaatcatagaatatttggatttatttggtacttcggacattttctcctattaacaaggagatttacttacttttcatttataaattcctagcttgagaatattaagctagaaatatgtattataggatataatattgaatgaatattttagacttctagatgggtgatgagattcagaattgtaaatcatgatggtttttaatatacctgggctgttttgatacaatttctaagaaaatgtatgtactttggttacatttgtgtgtgtatgcatgtgtgcgtctgtttgtgtgtttatgagttgttaaaggtaagacttgatttcagagattaagcataatgggaaaaaaaatgagctctacactttgaatttaagatccaggatatgtaggaatggatagaaagatgattgtcaggaaatttgttttctcaagagcacagcatgaattggtagtcccaggcggtcttaccaaaggataggttggggtctgtcttagtctgttcaggctgccaagtaccatagattgggcagcttacaaacaacacatttttcctcacagttctggaggctggaagtccaagatcacggcatcactgtggttaggtctggtgaggtccctcttctaggttgcagagagctgccttctcattgtgtcctcacgtggtggaaagagggtgagagagctctctggggtcagggccctaatcccattcacaaagccttcacccgcatgatctgctcaccccgcaaaggctccaccttctgataccatcacattgagggttaggatttcaacataggagctgggggtttgtggactacacaaacctgcagtccatgacaggtcgggtttgtattctttgactgtccctttgattttcatcccataggaatagagtgatgctgtggagtccattccaaaagatgaggtcccatgtgggtttatggtggtggatcgactctcagatacagttgcatctttttaaatagatgaacttccaggacgtagtgattatactacacgatacctttcttttttaaatgtctaggcacagaacattgctgaacgattgctgttattttttgcttgttctttgatgttgttgctcctttttattgtttaagtttggaaaactaaggaattttatacttcatttctaaccaaagaaacaactattgtattgtttatagttgctccttctgagatttctagttggtgtagggaaggcctttttttaaaattttttttttcctaaatactcataggaggctataaccccagtgatagagtaaggtcatgagtaaatttttaaaatttctttaaattaattgcaaataaaacagcctatgtaagtaagctttacttttcatgaaaatacctggctttagaaaaattaaaattaatgaatattccaaaatacttatcagtacctatagcatttgactatttggaagctctttttagcaaattattactgtttttaaagcaaattagcaatcctaacctatatataatgtatgtcttcagggtaaaatattaaagtctattttacgtactcttattctccctacatacattttaagatctaagaattataatgagaatctcaatgttttaagtcagtcaggaaatgatgctgtgagtttttccagagaaggggggactgtcctgaggctgctttagagaatagcgtttgtcctaacagctgtctctgccgtcatcccgttattctagtttagtctccgtttctcagttggcctcataaacccacttcagaaataccctagatagtccttgtgtagggttgcatctgttctaaaataaacccttattttggcacttaaaatgcaatttctctagtactaaaggacctggatttgggatccagtactttccctaccgtcttcttgctagctacctcctaccaaatcagccttgagggcccacggagaatgctagaaactctccaagagtagggtccacccaacctttaggaaccagctttgtgtgctcctgagaaaggtcagatgaggtcaggacaagtcttcaaggaagttgcctaggaactcaagtgaggcttatttagaatgctgctaaaatgtagcatgaaagagctgattctccacccagtagaagctgagcaggtggaggctaaggtatctgtgtttgacctagtaactattggaaacagtaaacatgaggtagatcactctaggaatagttaagaaaggaccaaaaaaagcaggcctcacagaacatattaactagatgttccacttctgagacatttttcagtaggtatctttgtttggtaatgagttagtttattttttaaagatttctattttgtggtaaaatctcattttattctcatgctcagataccaaggtataaaggacaaggtaagaagaagacaagcgggcagaaggctggtgacaaggtaacatgcatgagggcagaggagaaaagcagcctgtgggcatcaggtctcgactctggggcctcctggagcgctgggctcctgtcagattgggttctcagttttcttatgaaatgtcacttgaggctgggctaggtggctcacgcctgtaatcccagcactttgggagtccaaggcgggcggatcacttgaggtcaggagttcgagaccatcctggccaacatggtgaaaccccgcctctactaaaatacaaaaattagccggccgtggtggtgtgcgcctgtaatcccagctacttgggaggctgaggcaggagaatcgctttaacccgggaagcggaggttgcagtgagctgaaatcgtgccattgcactccagcatgggtgacagagtgagactctgtctaaaaaaacaaaaaagtaacgatggcatgaaataaaaagtaaatttcactgtcagtttttatccaggtgaaaatcatactgttgaatcttaaaaccatgctctcagttttactttgaaaattcctgttgtgttggcaattagagttgaaaatacgtatttttcttttgaatggatgattatatacatattagtaacattgtgatttttatttgaggaaaatagaacatcaaactatttttttgaatacgtacctattgataaattaaaaattaaacgtatttcctccaagatgtttttgtgttctgtcatttttcagacaattgcacatttgtgatcctttattcagtgcccctgctcacagtagactgctgggggccagtgctgcatactaccaaggccttggctgctttttcatcctctcctaaagatcacaaaaattgactaatccagtagattagctgcttatgaaatttaaatattagaagttttagaaacattatcagtacagtttttacatgtacttaggataagacaaaatatttaattttcagttctgtgagattcattagtcctatgctgaactttggttatgtatagattttttcactaggttgaaaatcttcaaacttaaagctttttaaaaattccacctgttgtgttagatggctttagttctaggagtttcaaaggtaaattcctattactgtattctctttctgttcacactgttctttatgcgttattaaacaagaagttgctttaaaataatgatttagtaagttttttttaacatttacatagtgaaagttattgtgtgttaatgctttgggcaacacatttaacacagttctcacttaaggagtttatagtttaattggagagatgagacataccttaagtaagatataaaacttcttaatagattttaaaaatcagtttcttgggcttttctaaaatttaaaagcatattttatagtattaagcttttataatcttactgctattgtgggtttcaaacaacttaaacattttcaagaagtttatacatagagccaaggcatcctaagagatgtggttttcactttgtgtgatgtgaaataactgtgatgggcccagactttagctttcgcggtactttgggcagagtgtagtgtgtgccctgacttgagaggggattgaagaatctaggtgggcccatatcccaggatttagtccataatttgggtctcttctatttcattgttgtgttcctgaggccaggatgcttcctcaattacttggaaacctttttccctgtacatttctgatcttgtttctgaactgccttgtgagaagtctgtattgtaccccatgtggcctattgccagccttacttatatgggtaagcccttagctctttgttcccctgcctttctgctttgccttgtgcatgcagtgagttcccaacagccttaacattctcaacatcttcatcatccagatgctatgttgcatgtggtggttgaggttgtacacagcaagactccagatggagccatccgcatggtaggtgagtggcatctcccaaggtatgcaaagccatcatgggagccctgcctgtcctgcagacgtgaactgggcatgcgatgcaggagggcctagggtaccgctgctcccggagctctggagcactgatcaggagtgtcgcatgtgtccggttgctttcgaatgcaggaggcgacaagtactagtggctcactcagagacccttggcactttcttcagggaagctatattcatattataaataaacttaaaaaaacattcatatgtatagttagaattgatttgtagggtttttgaactgatgtaacttgggcaaaactgaagttcttatttttgttgttgctaagagacaataaagataaaaataaaataaagattaaagataaaagatttggtatacaaggagtataaatatgaaatgagagggcattttaaaaatgaattaataattttgaaatatatattaatacttgctgacttccaaagtatcatctgtgataatttatctcattgtattccatttcgttgtaccaaacatcctaattgtttggaaaaaaaaaaaagtatcagaaaattataacagacttttgataggccctactagcttaggtttttaccatttagttggaaatgttgagtaagatctatatttttttgtttttaatatttagaattagttgctctttatcattatattaaatgtaatatgaaagatcatcctttcttcttacaaatagttttcaggtgtctgtttctttttagagacaaggtctcactctgtcacctaggctggagtgcagtggtgtgatcatggctcacaccacttgtcctcctggggtcaagtgcccacttcagcctcttgggtagctaggacaacaggtgcatgccagcacagctggctaattttttaaaaaatgttttcatgtagaggcaggggtctcactatggttgtccattctgatcctcaactgtggggctcaagtgatcctcctgcctcggcctcccaaagtgctgggattacaggcatgagccaccgtgcctggcccagttttcaggtattttaaaactaacatgtattgagatgctttttcacattacgtgtaggttttggggcatatgtttttgtatctttggcagtcacctgaggattttccaaaccaggcgttaccattccctgtcacactctcacaccatcctgaatgaatggatacatggatgcatgaatgttcccacacttagccctgtagtaaaattacttctctaaataattcattagtaagtcatggatcagaaactgtcgttggcagggagagaggtggggggcagaggcatgggtgaagagaattttaaatacagtcagcctcatatctggaggtttcatatgcattgctttcacacctgcagattcagtcgtatgtaaatggaaaaatggttataaaaaataataatacaaattttatttattatttatttatttttttttttttttatttttttgagatggagtctctctctgtcgcccaggctggagtgcagtggcacgatctcggctcactgcaagctccgcctcccgggttcacgggaggctcctgcctcagcctcctgagtagctgggattacaggcgcccaccaccaagcccggctaattttttgtatttttagtagagacggggtttcactgtgttagctaggatggtcttgatctcctgacctcgtgatccacctgccttgggctcccaaagtgctgggattacaggtgtgagccaccgcgcctggccaataatgatacaaattttaaaataatggtatacaactgtctacatagcattacatttattaggtattacaagtaatctagagatgattcaaagcatatgggaggatgtgtgtaggctatgtgcaaatactacagcattttatacgagggacttgagcatcctcggactttggtgtctgcaggtgtcctgggtactgagggacaactgtattgcatgaattttttgaatacttttgcaaaacaatagtatttctttgatatttttcctacatgaacagtttggaaaaaaattcttttttttttttttcaggttcttaagtcagtctgatacaattcagtttttgactactgaaaaattaaggtttctcattgtgaaacttctctagtgctgactttttgttaatctagaaatgattggcttctttattatatgagtgtactattggataatttaaatatatactaaagctttcttatggctgcactataatttcccatagagcttattattagtcttgagctccagccaagagaacttaatgaccgttgtagtgctgtgcaataggtccctcacttttatgaaaagacaaaacttgttttagttttttgttataaatgacttgatttgtttcctagggctaatgtaatataagtaccaatattgggtggcttaaaacaacacatgtgttgtgtcacagttctagaggcttaaaaatgtgaaatcaaggttcgcggagggctgtggctcctgttctagcttctggtggctgctagacccagatgctgtttggcttgtagatggattactccagtctttgcctccatcttcacatggacttctccctgtgtttctctgtgtctcttccccccagcaaggataccactcattaggttaggacccaggcccaccctactctttgaatggactcatcttaactaaatacatctgcagtggacactgtttccaaataaggtcacactctgaagtactgggagttaggggtttcaacatatttcatttgtgggatacagtttgacccataacttttgtgcttgtccagagaatgaattctaaggcattgccatggtatgtgtgtgtgtgtgtatttttttttgagacggattctcgctctgtcaccaggctggagtgcagtggcggcgattacagctcactgcaacctccaacttcctggttcaagcgattctcctgccccagcctcctgagtagctgggattacaggcacgtgccaccacacccagctaatttttgtatttttagtagagacggggttccactatgttggccaggatggtttcggatctcctgacctcatgatccgcctgcctcggcctcccaaagtgctgggattacaggtgtgagccactgtgcctggccttatattttttaaatcttatttgttagtttttaaacaatacttaaccttagttatttagcttcattttgaatcttcaacttagccaaatccaggtgatacaaaacccaagtaactgaagtttatgtacgtaacataagttcgtcttaactcatgataagggtttttaaagcagattcccgggtatacatacgtatacagatggtccccaatgttacaacagtttgatttatgcttttttgactttatgatggtacaaaagtgatatagattaagtagatagcatacgttgagttttgatcttttcccaggacagtaatcggtggtacgattctctctcggggccaggcagtgacgttgagccacggcttccagtcagccacatggtcacgaggcactctgatgccaggggactgaatagccagcattttttggatattgtgtttttgcacctcatgtttatgaagtgcccgttttccactttgtgatattttcacttgacggttgatgaggtgaagcgctgttgtgggttgagcatctgtgcacatgcatacacctgctgtgcacacgcatacacctgctgtgcacacacatacacctgctgtgcacacgcgtacacctgctgtgcacacgggtacacctgctgtgtacatggaggagccactgaaactgctctcagcgttttcagtgctttggttttaatctgcaaaatgtgttgatgacaaatctttctcctcttcctgtagatttttttaatagtgaagtttatttggaattaagtttagtgaattcattaataacctagttggtaatggtcttttggcaaaaatgagccatagttataaagtagtaacatgttactgtgtggtttagaactagattttgagagcagttccaaagcagattgtttcagaatttatttttactccctggattaagagaactatatttttaaaataattctgttatgtttacaagtatgtgttgtgtaatatagtaatgcccttctccgtaaaacttgtcttcctaaaactggtctttctgtctatagcgggaatattggtcaaacctgtcaaataatcatggatacctactagttgctcagctttgatactagatagttcattatgtggatttaagttacattggcagtgtgaattcttggggaaatcagaataattattgtttctcataatattgctttacatttacatttttcagtttctgtcatgccagttattctttggcactttctcatgagtgtttagaaggagagaatctgtcgtggccacaggctgtgtcattgtacatatgtttaaatatcacatcagggtatttatttccaaatgcatattcttttaaaaagacataaatccattattaaaacagtgtaaaaatcagaaattacaactgctgtgaattacataatatttttctatatttgataataccaggaaaatgtcaagaaagttgttaggaaatttttgaaagtttccatccctttgaaaatatgttgtctaaaattataacttgctatttattttttcagacatctctttataatcattaatttatattaataacatggaatgtgtagctctctagaaggcaataaaatttgcacagcatatatcttgcctactgtcaactagtcaagacctctacctggtgtaaagatgtaaacgtatatcataagacatgcataatgcattctgtctgtacccatatgaaaagtgaaaccatccttcaggagcgtcttgttcggtaatgtctaacccagactttggtcaccatgcttcagtagttactactctttaattctttctcagccatccatcccttcctagatataatttgatctgaaaaatatgaatctagttcaattcttgaggaaactcatgcctaggaaattaatttacttaagattacacgggccatgtatggtggctcacggctcacgcctgtaatcccagcactttgggaggccgaggcgggtggatcacttgaggtcagaagttcgagaccagcgtggccaacatgttgaaaccctgtttctactaaaaatacaaaaattagccaagcgtggtggcacgcgcctgaaatcccagctactcaggaggctgaggcaggagaatcgcttgaatctgggaggcggaggttgcagttagcccagattgccccactgcactccagcctgagtgacagagcgagactctgtctcaaaaaaaaaaaaaaaaaaaaaaaagattatacgactgggtgtagtttgtgcttgtaatcccataaacccagctacttgggagactgaggcaaggaggactgcttgagcccaggagttttaagaccagcctggatgacatagtgagagcctgtttcttaaaaaagaaaaaaaaaaaaaagaaaaaaaaatggagttaataattttggactacattccagattccttgtttcagttgagtgctttttctattattccacgggtattttacacaatactgctctctttagtatgcaaggctgaattttgggaaattgccatttttaacccataaagcccacaaattcattataatttagcttaatagcataaatattgagttaacctctggaagcaggctttgactttgatattgacctgaccacttaactctctggagactttgacaagtgacatcaatgtctgtctctgtgtttcctgatttatatccacagatagaaagccatctccagatcctagggccattttcaagattcagtgagataaggtgaagcatttgaatgttctccataaatgtcagctgcttttattattactagcattattttttgttttcattattattattaacatagacccgtctaagggcagaaagaaatctgaccaagaatggagtgaaagtcggctgtgaaggttaggactccctgaaaacaaaaaagaaaagtggtaacatcactctgtatccaagggcatggataaggatgattcagaatttttttataacattgatgttaatatacatagagaaatacacacacacacacacgtatatatgtccatggacatcaaaatgaggtataggttaggaagttaccctggaagttagaattgagataattactttgattagcaaaggtttatgttagaaatatgagtggttgaaggcagcgcctttcaccttgatgcctgttgtgtttagcactggatagaaaattgctatttttactgatgactactttaatgcttggttcattcatatgaaataatctttcttttctcctttaataataatgatctctcctgatttcaagttgaaaatgtattaatttaagataacttatgaagcaatgacatatggaagaggagatgggaaattgtttctcaatgggaaagtgtttataaatgggataggtatactaaaggtatttccatttagggaaagaggaaaggaatggtattaatatatttctctaatatttttccccctttgaaagtttgccatgttaggaatcctggggatggagtgatgaattgtggcattgctctgcagttcacgctgctgagagctgccccaacacacacacacacacacacacacacacacacacacaaaggttgcacacacacaggtttgattatgctcatgagacttcttttattattgaaaatatcttaaagttttatctcaccaaggaggccttttctctttccctctctttctagaaggccaatgatgaggccaatcagagtgatacaagtgtctccttgtcagaacccaagagcaaaagcagccttcacttactgtcccatgaaacaaaaattggatcttttctaagcaacagaactttagatggcaaagacaaagctggcctttgtccagatgaagatgatatggaaggagattctttctttgatgatcccattcctaagccagagaaaacttacggtttgtgagtaaatggtttttgagctatgagactaggggtttaaaaataagataaatgttttcattttatagttaaaaaataatgaactatggaaggtttataattattggatccataaatctgactatgcgttgttaatgcctttcatgttgtaaaacaatcccagattttagaaaaacctagacatgatttattccaacaagtaagtgtagattgagtgtcagccacttgccagggctgttccagggtggggtgcagcaatgatagaagagggaagactcctgccctcaggaagctcatgctctggtgacagagtcaggcaatgagggttatgctgcagtgtgtggggtgatgagagcagagcagtgatgggagcccgagtgtgtggtcagggcaggtgcatgtcagctgtccaaattggagggggcctcacttggaggtgcccagtgagcaaagagctagaggaggtaagggagttgccgtgggttgatggagctttggggagaggaaacagacagcagggaggcgagttgggggtagcagagagagcaagatggggatcggatgaggtggactcagagatgaggagctggacggcttttctttgagactggaagccctgaggatcttgatctggcgtacattacagaaggatcctgaggttgctggggaaggttggtcttagagtttccagttaggaggccgttaatgatggaaaaggatttgccagtaagtgctagagaaaagtaatatacagagtggcatcatggtttttagcctgcaaaactagaaggttggaaacacgttagatgaagagtggcaagagcaagagtggattacacagacaggtggcatgacagcctggaggcccctgttgctgtgctaagttagagaagattgctagtggaaatccaaagtaggctattgagtgtatgcgttgggattgatggagaggtctgagctggagatgtaaattaggagtcatcagtttgtagataatgtggggtgtgggagactacagaggatcaccaaggaagcaggtcctgcgcaccttgaggccagagcagggagctagaagcagcagaggagatggaaccaggagagtggtgtctgtggaggtggcggtagggaggagtagctgtatgatgccgttggatttagccatctggaggtcagtgatgaccttgacacagttttgttggaatgggggtgcgaggcaggttagagaattagagtgcattcaagacagacaggaaaggattgtagatgaaaaatagttttctgatgagttgtaaaagtgtgcagaggagcagggtggtggctggaggggcaggatttagggctgaaaaacgtgtttaggtgggagaaataacagcatgtatgctgacgagagctgttcagctttaaagatggaagaattaatgatgtaagggagtgagaggagaactggagggctgcgcagcagtggaatcccatgcaggggcttgtgtttgctggaaaagtggagagcgtgtgggtctcattgtaggcagggggtggatatgatggtggcacctgtgcaagctgtcacctgagttcatagttgagtgaggatggaggacggaggttggagataagaggagagtggagaaagcatgaaatctttctataagaaagtaaggcgagaaggcactgtggaaacccggagggttgttgggcagttttaaaggtccccttgaggttagtggtcatgactttaaggggagttcatcagcatggctgttagtggcttctgtaagcaatattaaatctgagaggtggcacttatttgctagtaaactcctgtattgtcccttggctgcatgtctgggtaatggaaaagggcttccgaaaaaaatcacagtgaagaggtcaatttagtttatatcaaacagaattctaaagagaggtgagctgatttcttacgccctggctgtgccgattgtggttgatctgtagtttgcactcccttggtgtactttatggttttgaatctttaaagtgtatattcttgatttccagccaccacacgtataaaatatctttaagttgcttttgtttctgtggcagaataaaagtgtttagtggcagaacataagagcaccgattaactgtccttgtttcttgttaggaggaaggaacctaggaagcaagcaggaagtctggcctcgctctcggatgcaccccccttaaaaagtggactcagctccctggcgggagccccttctttaaaagactctgagagtaagtgcccaaagatgtggacttcaatactcgggatattttttctctaattaaatactatgtgattattgttgattttttttcccaggaaaatcactaaaataacctatcattttatcactcagagatatttcctgttaatattttgttgtgttttgttacttctaaggtggtcctattttatatgttgttttgtattctggcccttcctatacctatataccatcggaatacttttgggaagttgactttttagctgatttttattatctatagaaataaaatttttaaatcatctctccttttttggacatttacaatgacttgagttggatttgctttcaattaatttttaaaaatttggtgataccacagtaagtatcataaaatgttaaataaaaaattattctgcagatcattttcaagaacagtgacctgacatgtcatcgtaaatgcagcagagctaaagagcactggttacacatggaatagtctagctctggcaccagttactttcccacctctccccacacacagtgataggaatttaaaaagcatagccctgaacatgtaggatgggcagaggtcctttggaaaccgtatcatagtaaatgttgtatttaattagcgtagtgtttcagagcacgtgtacctcttttgagaaagtttcctaaagtagattcactaagaatttgcagtatgcgttttgcataattgtccagtatttccgaatctttttgtattgcttgatatactgtgggacttcctagggcacataagagagccggcctgttgcttctcttaaaccagccatgtatttataatgtccgcatcccttcccatttgcttctttcccgtggttactgccacctttaagaaaggaatccaggacatcatgaacatgtcattctgacattgattagagaatgatcatttagagaggacgttgagaacaaaggactaaaaaaccagtgaggatgtcactttagtaagtgaaatagcagttgcactgaagaaaaatttagaaattcaaaggaaaaataagactcatgaaaataattaacagtctatgaattcatacctaacagggctgtttatggaaagtgatgtcttataatgaggcaaaaaatggtttttggtggttgtgttccaataaagtagtattgtttatggtttaaaaagggatgtagctgggtgcagtggctcacgcctgtaataccagcactttgggaggccgaggtgggtggatcacgaggtcaggagttcgagaccagcctatccaacatagggaaaccctgtctctactaaaaatacaaaaattagctgggtgtggtagcacatgcctgtagtcccagctactcgggaggctgaggcgggagaatcgcttgaacccagaaggcagaggttgcagtgagctgagaccgcgccattgcactccagcctgagtgacagtgatgagactccgtctcaaaaaaagggttgtgatgcatagcttaagcgttcattaatcacagtttattttttccttagttttaggttattatgctcctgtcataaagaagccccatattgaacaacgacaaaaattgatgtggtttagagactgttatattctaagtcactctaatgttaatattttctcctgttcacaggtaaaaggggaaatacagttttgaaagatctgaaattgatcagtgataaaattggatcacttggattaggtaattagatttctagtttttgtgctgatcgttttaaagtgattatttttagggtaaggctgtaaaagaagtgactccgtctgcctacgctgagcaccttcctgctgctgctcattcagcaggtgtttgaatggcttttatgtgttcaggattacacgctatgcgagagatggctacagcaacagccatcatgttctcgtgaacctctgtcttcatggagtttaaattctggtcaggaatatgaacattaaacgggcatctacagatattttgactgtaaaagggtcagtatatatgggtatagaaatggctagtaggttacctttgtccagtcttggcattcagggaagacttcttataagaagtgacttctgtgcagaagcttcatggttaagtacatgtataagagagaagggaagatatttcagttcagactgagaaaaatttgggcagaggcagagccatttgctagatgctggtagtacatggtccaggcctcagagaattcagtctagtggggaaacagacttattgaaagaaaaattgtgagatgtgttcagttctgttctatggagcagaagttggtaagcctgccatgtaagtacattcattcctatggaagtaagagtgtcgatgtgaacattaccgagccctgggccatatgttgagagcacatttctcattcagtgttctgttctgtgcaagactgtagcagtgtgacaggcatactttaggcaaactcatttatgtaaaggcaaacttggtgacctgaaggaaacggtgcagccaggttctcaatggccacttcctatgctctctgtggatgtgatgggatcccttcctggtctgtaatcactcacatggaagcattggaagagcttcacaggcaggttagggagaaagaaaggtgtgtccccatttgcttttaaaacccagccctgtccaaggggcagctccgagaatgcccttccctcttctggagagacattctggatagtgcaaagaacttgggcttggagttggatagaagtgacatctcagatgtggcactgattgatgggtagcgtagggagataaactaaactgctatttcctcatctgttaagtggaactaataacatctgccttgttttaaagagtaaataggatttaaatatctcttcatatgtaaattaaagtacagtggctggcatggtaggtgcctagtaaatgttagttttctttttacgttacttttccccccatttgcagaagaataaatgttccctgagctgcccggattcttgttccgcacagtgccctggagtcctggtaactgagttgctggttgtgctgccatctgctctttgtgcgtcctggttgctggctggccagctaggtgggcctgcctcctttccctcccttgtgcttttcctgtcagctgtggtcatggttgccattagatgttcttttccactaaatctcagtggctaactgccaccagagactttactcctgacctctgcaccgtgatggccgccttgtcccctttgtgttctgtttttttcacttttgtggtgtttcactctgttgccaaaccttttagcttttttctctgactgctctattctcttaccaaagcgagggttttccctcctgtttctgagtggggagctgccgagaattgtcatcctcaggagggaatgtcgttgctggggctgcagagttgctgggtacaggcaggagggtggtgtgctccttcacttcactttgtcttgggacttaggcatatctcgggttggaattggggtagttatgcaggtgagaactaccagttcactagctggatgtttgtcatttagctaggcattaggattcagtagaaataaagttttatttcgttttgcaacaatgttgttttctgtttgggttgtttacattttaaatatacagtactctaggtattttgagtaatatgtagacagatgttagtggaccagcctaggagaataatgatgttagtggtaagtgcctggcactgtaccaaggaattattttatttaattcatatcctatgaggtaggttttattactatctccatttttacagatgaagaatctaggttaagtaacttgcccaaggtcatgctgcttttagagtcctgatgcatcacacagagccctcaccactgtgttttactgcctgtatgttatttagacatattgaaataatcatttcaatgggaacataaattctgagttccaaataaataatctacaaataaagctttagagcaccatctattttagtttggcagacaaatattaattaaaggtgcccaaaaggagtgtttatagataggtactttgcatatttaaagcaagagttgctaagctttttccgtaaagggccaaatagtctatattttagggtttgtggatggcatgtactgtctctcacatagtctttgtgtgtttttttgtttttttgttttttaacaatctttaaaaatgtaaaagccattcttagttcacaggctgaacaaaagcaggtcatcagccagaggcaagaatgaaagtaaggaaagcagaaggctgtcaggaagtccgggccaaagatgactggggtaagggcagataagacagagggtatgggatggggaggagagactgtcaaaaaatgaagaaaacaagaatccttggcctgagggccaaaatttgctgacccttaaagtaatgtagtacaggttgagtatcccttaatgcaaatgcttgggaccagaagtatttcagagtctggatttttttggattttgaaatgtttgcatttttcttaccagatgagcatcccaaatctgaaaatctgaaagtccgaaatgctccaatgagcagtttctctgagcattacgtccccactcagaaagttctggattttattcaagtttggttttcaaatttttgaatttgggatgcttaacctgtatgtattctgttaatcattttgacactggcttaaattattgtaatactaaacaatacataaccaagaagtcagaatctgatgtgttatagcacattattcagtaaatatctttgtctcatgtgtctgtctgaagagaccaccaaacagtctttgtgtgagcaacatggctgtttatttcacctgggtgcaggcaggctgagtccgaaaagagagtcagcaaagggttgtggattatcattagttcttacaggttttgggataggtggtggagttaagagcaatgttttgagggaaggggttggatcttacaaagtacattctcaagggtggggagaactacaaagaaccttcttaagcatgggggagattataaagaaccttcttaagggtgggggagattacaaagtacattgatcagttagggtagggcagaaacaaatcacaatggtggaatgtcatcagttaaggctattttcacttcttttgtggatcttcaattgcttcaggccatctggatgtacacgtgcaggacactggggatatgatggcttagcttgggctcagaggcctgacaatcttgtgttttgaattggctacaaatgctgccaggtggggaatccagttagctttctttaaatccacattgcagccacagccgtcctcgctgtctcagctcagtgtccacctctgctctcctcactggccttcacacataggaacactacaatgggtccttggaggctgacattttagtagctgccactcctggttttacttagcgcttgcaaaccagccacatatgtagtttgtttaatcagatttccacttctccttctcggccctgacagtgcctggtttctggcaagcacttgcagccctttaacctttgaggctacagtggagacgagctcttgattctcaagaggagaggaagctcctgacatgtccctcctgactgcttatgatcagggatttccagttcattactgggcaaggtttggatgtagcaggaacaaggactcatgttttcttcgtttgctgatattcttcccaccccatatcatctacccgtctgtcttatctgtgggacacctgccttgacccaagccttttacccctgttctctttggcctggactttctgacagccttctgctttccttactttcattgttgcctcctgtacacatatttcttctggcggtggtacgattatctctgggaaaacagaagtgaggtagtgctaccctgcactttttcactcctgtcttcccccaccccaccccatccctttgtacaaagcttccctttgtattcaggctaagatccttattgcaaccaaccaagccctaatgatccggcttctgccaacccttctgatcgccactccttttttcttcctccacccattctgtcccccaaattcattgttttatggttgtatggcttccttactggtggtttttacattttttttgagacagtattttaaaaattaaaatttaaaaaataaaataaatttttaatttttgagggggtcttgcaatgttgcccaggctggtctcaaactcctgggtgcaagtgatcctcctgccttggcctcccaagtagctggattacagatgtgcgtcactgctctgggctgcactggtggtttttcaaaccaccgcaccctcccccacctcagggcctttcacatgtttcctcttggaacacactgtccccagtaatttgtacctctgcaacctaggtttccactcagttgctaccttggagttcttcccaattgcactagcagtatttggtttgttccactgttcctcttcactagagtgtttgctccctgagatcagagataccatcttagtcattgctatacctctaggggacctagtcatcactcagctggttgataaattaatcatatgatttggctgtaagagaattacattgtctaactgtctggacagagcttgaatcccctcagcagtctgaccgatttagagacagtccagccttatctgagggaagatcgaggacaaggcccgcagggtctttgaacggctctctgtcatgccaggtcttctttttgtgatctgcatcttctgcatgtggctgtacatgcttcctgggtctttcataggccatccattcacattttaagttggctctcatgtgcctccaagtctgctttgaggctgacaactctttttcctcatctagccctcagaagtcctgggagggaagggctgctgatttgcaaatttgtcctttatagccttaagttgatctgaaggtgccccctctgtcagaggcttgtggtgcactttgagaaactggtaacactgcctcactattcaccatcccaccttcattcagttgccttttattaagatcttactgtggaccaaggtctctgttaagcacatcatgtacctgaatccttatgttaactctgattggtgtggctttggctgtacgtcagagcagaggacatggcccagaaagggcacctcacattcccaggtcacagagctgttgagtggcaggtctgaggcctgagcctggctctgtctgactgaaggtgcccttatttgctgtgcttcatggcctcttcacacctcatgagtgttttttaacttttataacaaaacaattagcatgttgaaaacgctcagtagttcatctagtacctagaggggattgatgatgacttgctattgctatacgccattaagtcaagggaccttattaatggtgagtgtgccccatgttaattgccttagagtacccggagtaaagatgaggtgttaaccacattttatagtcacttgtaacagtttattatttcttaggtatttcatttgtcatttgtcttcatattatatatgcttaaaatgttatttctagtctgggactttttaaatgatgcaatataattaattttttttaaggaaatgtgtgtttaatggtaggtaaattgtgacgcacattagatataacatatcttttcttaaacttatcaggaactggagaagatgatgactatgttgatgattttaataggtaagaaaaactattgggcaaatatataaatatatacgttatttgtaaacaatttccgaacacagacaagacaaaattacatttggtgcttattttaatgtatttgattctgttgttcatattgattgaagatgaagaaaagatagttaatccaaaattaaatatttgattttagagcatgtttttgattttacattagaatatagacagtcacattatgttcaggaaacttggtaagaagaagagaaacaattgaagaattaactgagaagtcatttagaagcagttcagttgccgtgtcataagtgctgattttctcttccttccatacctttttgtggcgggaattgtctcaaaattgacctaaaataattatgctctcaaattagttttttgattcagatcacatttcctaatatgtggatatgtggtctgccctaataagattgccattctctttttttttttttttttttttttttttttgagacagagtctcactctgttgcccacgctggagtgcagtggtgcgatctgggctcactgcaacctccttctcccgggttcaagccattctcctgcctcagcttcccatgtagctgggattataggtgcgtgccactacgcctggctaatttttgtatttttggtagagacagggttttgtcgtgttggccaggctggtctcgaactcctgacctcgtgatccacccacctgggcctcccaaagtgctgggattacagacgagaaccaccatgccctgtcgattcctttcttatacacagaaagataatatgtaatgtagaagtaatatttgttgtggatatgattcgaaattttaaattagatgcctgagaattttatttaattgacaggttatctttccaattggaagtctgtatttttttttataatttattatacagtttttgagaaagagcatgatgtagtagatgaaattgtaaaaatctgggtttgtttctttcttgctattgtgaccaaagtcactgctttgaacctttgtctcctcatctgttacattgacttgactgctgctgcccttgctacattattttaagggtcaagcaagacaatatgtatgaaattaattatagttaatattatattttacttaaaggattaaaagaaatatctgaatgtttaaagaatagtaatctctttaaatgtttattttcagagttcttatttttttttccccttctgaaattagtaccagccatcgctcagagaaaagtgagataagtattggtgaagagatagaagaagacctttctgtggaaatagatgacatcaataccagtgataaggtatggtgttctgcatttcccatagagtgctttttttttttaacctatttgtcgatttactgtaaagcttcaaaattcatactaattagtagaaaaacagttgaaaattatgaaaagtcatgacagagacctggctcgagtttataaagaatgtctttgatgaatgtgtaagattggttttggttgtcacttcctttggtatgcaagtctcgctgctgaaatgcctgaggattattcctggggcactgggattgctgtggattaagagggatcagggtgggtcaggcttagtgagaattgaccacctggtgccataggtggaagtcagtatagggtactgtgatcacaggaggaagctgagcctggagtgcagagagtgtggtcatcttggccagttgtgacatctgaacaggcaagccagactgggctaaaatccacaggagacaagacagtaggccataaagttagagtccgtatttgagatccaaactttacctttttatgtgggtggagaacagaagatccttcgatggtgagctgtagcattgcagggtcacctgtcagtacccacttcaagctgtccccagctcagaggagtctaccagtcaggttggaggttgccatggctgggtggggacttgctttccagaacatggtgggattctccaagcgctgtgattgtcacacagggagaaggcctttgagagaggtagcgtttacaatgcaaccacacaatctaagtcagcagcatccgtgtttgcattcttattctttcatatattttcttatttaagctttaacctttgactctcagtttctttacttgtaagatggaagtattaatacctatgtgataggattattttgaaggttaaatgataatatataaagcacttctctaattcctgatgtattatatacccttataattataaatttagctttctcttttcaccctgcatcatcctaaagaggcctgaagaatgttgctttaaagttataccaaagaaactatgaaggattctttaaatatgagggagaggactcgaagaaatgactgttaaactaggatttgtgaaatgacgtgggttgaagaggaggtgtggcatccctttgccattgggggccttggatggcgtccaggagtctgggctttgttagactgcttctcactgggtcctactcactgggtttggcacatcaatgttcctaggagttttcacttaaaagcttaaatttagataattttgccatttacatagattggactttgacagtcactgtacttcatcaggaagcattttctaaagccttctgtgtagagaattgctactgggcacctggggaacacaaaagcatttgtattctttgcagtaagaatacagcagacaatctggtcacctttcagccaaggtgaccaaaaccagtgtccattaagcacctactatttagagagcacagggctggggatgtgggggtgtgaggaaggagatagcccagtggaatgggcaagttctgtaagttcatcacatctgggtttgagttctggagctgctacttaccactcacaaatttggccaagttatttaacttttttttgttttttttttttttagacagagtcttgctctgttgcccaggctggagtgcagtggcgctatctcagctcactgcaagctccgcctcccgggttcatgccattctgctgcctcagcctcccgcgtagctgggactacaggcgcctgccaccacgcccagctgattttttgtatttttttatagagacaggacttcaccatgttagccaggatgatcttgatctcctgacctcgtgctctgcctgcctcggcctcccaaagtgctgggattacaggcgtgagccaccgcgcccagcaagttatttaacttttggggccttgggtctcacatctattttgcaagagagatggtggtagtgaaaattagagataagcgtgtaaagcatatagctcagtgcttagcagaacaggcattcaataaatggtatctaatactattattcattgtagtcacaatagacatttctgtcgtaggcacagatatagacttcttccctcaaatttatgcaggatcagagagagaaaagccatgtacacaaacataggaaaatcaagataaaaagtgacaggtgccataaaatgccagtcattcatgggccatgaaaattcagaagcaggaactaatatttgaccgggattttgaaagatgactctgacttggttctgcgagggctgaggaggaacatggtaagctccatgagaacagaagggagatcccgggacatgtcagtgctgccctgattccagagcttcactggagggtgctgtgtgaagagacagaatgttgggaggagcagggttgttagaaggtgactttgaaccagaaatgacagaggatgaactaggagcagaggccctggggagggtagtctctgcacgggagccagcacgagcaaagacataggtagatgttggaggaagagggccacacgttcctaagggacagaacataagtgtgcatcccaggtttctgttaatgcatagcaatctaattcagcaaacgtgaacatttacacttcataaaacttttcaaaatcttacaagttcccgtcgatttgtatgaagcttgctatcacagggatcctttgtttccctttcaagactcaaaatgtacgttttagatatttttattttgtgatgtaaaatctatttttatagttttgaactaagttggtcactttgagttcttattctaaaactaaggaggcatgaaagccgcctttattagttttgtttttgtttttgtttttgtttttgagacagagtctcactctgttgcctaggctggagtgcaatggctggatcttggctcattgcagcctctgcctcctgggatcaagcaattctaccttagccttctgagtagctaggaccacaggcatgtaccaccatgcccggctagtttttgtattttgagtagagatggggtttcacctatgttagccaggctggtctcaaactcctggcctcttgtgatccccccgccttggcctctcaaagtgctgagattacaggcgtgagtcactgtacccggcggaaaggctttattaaatagccatttatttctagttagcttttgttcattcagttttctttcttggtaactactttaaatgaaactgttcttcttggaagtttctggttattattgtggtcttttctttgccttaaagcaaaactaaattaatgatctccaataactgaattatctagattaagatcgttttcagtccacgatttttcctgtattcactcttgtctgtagtttagcatttgtattaatataacactcaattactttgtaaacgagatggaataccttactgatttcactctgtaataatgatgggaagagaaaattacagttccaaggtatcagtttgttttacagtctgtctgcaagcttttctgacttttcagtttttgtgtaaattggatttgaattgaatgcataagaactgtaattaagattcctaataattttctttgtgagatagttttacagcaggactatgtttggaccaagagaaagggcaaggacttatttgttgaaaaggattttacttacaacttaaatttctgaatatccgaagaataacaaaatgagaggatatgtggggggcagatgaacagacaaataaaagcatctcacagtatctcgggatgaaactgttgcatctctacaagatgttcctattcttgtgcgttattacctggcccaggtgttggcacacttgttctctaaaaggccatatagtgaatattttaggctttgcaggccataactactccaccttgccattgcatggagaagacagccatagacgatgcctaagagtgtgtgtgtgggtgtggctgtgactgtcccctggtctgttgccacaacaatgagtctaggtgggactgggaaggttgggttctgtccttgttcagctgtcagtgggacctgcccagctgtatgttctatattctggagcctgtatattcacccgtggttttttccttagttaagaaatgttttcccagcctgcattatgcttacatatctattaatatttcctttctccattatcatgagttgtttatacaaatgaatagatataagttggttaataggttaactttctagtttacaagtagtttaaacagaagtagaaatgagtcgtttcttacaacactttgtgaacccggggctgggagtctgagactccatgggccgtcctgtctgcccttctgttttcacttcatgatctggcttcaggtggcacagtgttaaagtgtgtcacaccatgtcgagtttgatgttagaaacttaacgttctataccgtcatatgaaaacataagaagggatcgtttccaaattatacattttaatgaattttcgtgaaatttaacgtgggtaaattatggttttagagttagcaattcatagagtgatacttcctgtgaacagaatcatacattgggactatgctcaggtaaagaagtttaatacagtttttcactaatttgtttcttagattaaattggaataatggctaagatgtgttttattttaaattttcacttgaaatatttgagaataatcataaaacattgggctctaaagattgtactaacttagtagacatgattttaggcaaatcgcttctcaacacagctttaaatatgagttggtttatgaagtataaagtaatactttacagcaacagtttttttaatttttagttttttatttcttatttccataggttttgggggaacaggtggtgtttggttgcatgaatgagttctttagtggtgatttgtgagattttggtgcacccatcaccctagcagtacacaccgggcccaatttgagccttttatccctcaccctcctctcattctttctctggagtccccaaagtccattgtatcattcttatgccattgcatcctcataacttagctcctgcttattaatgggaagatgtgatgtttggttttccattcctgagttacttcacttagaataatggtctccagttccatccaggttgctgcaaattccattattttgttactttttttttttgagtcggagtctcgctctgtcacccaagctggagtgcagtggtgcaatttcggctcactccaacctctgcctcctgggttcaagcgattctcccgcctcagcctcccaagtagctgggactacaggcacccgctatattgtctggctaatttttgtatttttgtagagacagggtttcaccatgttggccaggctggtcttgaactcctgacctcaggtgatccgcctgcctcagcttcccaaagggttgggattgcaggcatgagccactgcgcctggcctatttgttcctttttatggctgagtagtattccatggtatgtatataccacaatgtctttatccagttgttgattgatgggcatttgggctgggtttcatgtttttgcaattcggaattgtgctgctgtaaacatgcgtgtgcaagtatctttttcatataatgacttcttttcctctgggtagatacccagtagtgggattggtggatcaaacagtagttctacttttagttctttaaggaatctccacgctgttttccatagtggttgtactagtttacattcccaccaacagtgtaaaagtgttcccttttcaccacatcttcactgacatttatattattttttgattttttgattatggccattcttgcaggagtaaggtggtatctcattgtggctttgattttttaaaataacttaagactactcacattctgacacttaattattttctttcttttgaacaacaaagcttgatgacctcacacaagatctgactgtatcccagctcagtgatgttgcggattatctggaagatgttgcatagacacgaagaaggaagtattctaattaacaaggacagaggactgaccggttccattttttttttttccagacaatcactcagctggaatgtctgctctctattggtgccttgcatttcaaaaacactgcagatattttttaaaagtaattttcattttactaaacaaaatacttcctatttgagcccatgtgtggaagatttaatattcttaatttaactgtacatttctttatggaaattgattatctacactcagtttcattacagggaaggaacccatgaaaacatcagtgttaagagcatgatgaaaggtgtcaataaagccgtaggatcgcgcaaccctttgtgtgtgtggctgctggtacgtgtgatctttgaaaaccttggctttagccctctggaatcagagcttacccaccatagtatattttgatattaggtggttctacacatagttggcaaaatgacttggtaaatttgtaatgctgaagtatattagtataagttaaatttgatgtgtcaactttattttgtatttccttccatttggaaggtttgttagaccattaaggttatattaaagtactcttgtgtgtgctatttagttttgcttgttttaaagaaatctagaagtggttatgagttttaattcatagaattgtcaataacataacatttgcaatcgtcattcctcctgttatccatgtaagcagctttagtcgtaggttctcttcattataatttattatctgtaaagattccttgaaacttaaatgcatctgaaaccattaagcagtgcttttatttcagatctgtaagttaattgtattaaaatccaaattggaatgaaatagtagtaatggcctaagaccatgttcagtttgacaagctttatatactgtacataatttcattgtaacccttaaaaatagagccaataatagaatttccacagtctcatttatacggttaaagcattattgctattatgtaggtcacggatgtttataatactaaagtattttaaaatgtgcaagtagaaaaaacagtagaaagtgatgcatgcatatttatatataagtaaagcaggattgtgctgtttttgcactttataatttcaattaagttgcggctttttactacaagttaactttattagtaaaaggagcaaattagacctaattcattgatctcggttaagtgagcagactgcatgacttgtgtaatgccagtttctcatttcatattagcctaaatattacagaaattactccttgggctctaaaatgtagaggaaatgaaaatgtaaggattaaggctgtgtaacagaatctggctttttaaaatttaagtgaaactaagctgtaaacatcaagaggaagtaggacataaactgggccggtacagcctgggagccctgtgtatttctgccctccgtctgtgagctgctatctcagtctccttcagctcttcatgtcttagtaaacagcaccacgtgcagatgtaatcttgttgcagtcccccagtgtggttgttataaaatgcatttctttgtaagtcatctctgtaaacagtcactttctaaaagcactatagttctggtcccctggaatctggatcacatgtatgatttatttttaatatttgataggaactaggtttcagtgaaatgatttgaaagcatagcaggatgtggctttttaaatttatgaaactttcgaacagtagcaactgaaatttgtcacttttctgttacgcagagaatcagaccttttgataatatttgggagggtaaaagaaatatgccaaatatgaaacttttttgtcagcactacatacatcttttttttgcggggggcgggggggacagagtctcactgtgtcactcagactggagtacagtgatgcgatctcggctcactgcaacctccgcctcctgggttcaagcgattctcctgcttcagcctcctgagtagctgggattacaggtgcacaccaccacgcccggctaatttttgtatttttagtagagatggggtttcaccatgttggtcaggctggtcttgaactcctgacctcgttcctgccttagcctcctaaagtgccgggattacaggcgtgaaccaccgcacctggccagtactacatccattttattgaatgattttgaatgacttaaagttcaactatgaaaaagctttcttttcacatgtactttttgattaggtattatcaacttatgaaacttgaagatgtgaagtgacaggttttgcatgtgatgagtgttttctgttaaaaaataaatattgaaatattaacccattaaatacatttttatggtaacctatgttttacagtggagttttaaaaatgctaggtctttctttcattttattgataactacaaatgaataaaaagcatttattctctttgttgatattcggttgtgcttttatactttatgttggataacaacctgtgggcagttgtgtagatgccattagtccctgcctcatgcttgcccacagctcttcctcccctccttacttccctctcctgcccatgcaccagagctgtgccagcccactgctgcacagcctctgcacctgagcttgccaaagcccttcctgtctcaaggtgtgatatttgcccctccttgtctggaatgtccttcccctagaactgcatgaagctggtttatttcagtctcatgttcaaagacgcttccagacctaagggagatgtccattctcctccctgtccctgccccaccacttgcatttaccccttttattttattcatctcagcatactctgaaatggtcttgcttattttgtgtgtgtgtgtgtgtgtgtgtgtttaactatgagctcgtgagaacagggattttcttttaaactgctgtgtacctggcacaacatttgtcccctagtatgagcttggcatctttggggctgtaaacaggcttgagcactgacatggggcctggagaatgtggtttctggctaggcagctggaacaatctacaaaatctgaggggaaagctgtccttaccctaaacctggggaggtccctaggttcaagtctgcaggaaggggatctggttcaggagaaggccgtcctgtgaatttgccccacccaccaagctcagctggagcagggcctctgaaggaggtgccctctgtgtggctctgctgtggtgttggttcatgaaggacatgggaggggggcaggacaggagaggcagctcttcctggagaaaaacacacccagcccaagttggagccctcctgtggcattgggtggggaggattcccgccatcagttctctgtccatgggtgctagtctcacccctgccctccgagcagtccgtgctcccagtgtccctgtcctcttttttttttttttttttttttgaggtggagttttgttcttgttgcccaggctggagtgccatggggcgacctcggctcactgcaacccctgccttctgggttcaagtgattctcctgcctcagcctcccaagtagctgagattacaggtgcctgccaccatgcccagctaatttttataatttttttgtagagacgggatttcaccatgttggccaggctggtctcaaactcctgacctcaggtgatccacccgcctcagcctcccaaagtgctgggaatacaggtgtgagtcacggtgcccggcctagtcttcctgctctaggaagggacgtgtttggggaggaaatccagggcagctacctttgtgagttgtcctaatgctgcgttcagagttccacacgttcaacaagcatctgacatttaaggaaagtgaatgtatgtcatgaaagacagatgaacaaagaactgatcttgaagaaaatgtaatcaggaaacgagataattcaagaacaaaaacctgtgaaggactgaatgtgtcccccaaaatgtgtatgtcgaaacctaatcccacataggatggaattaggtagggcctctggaagttgatgagatcattagcgcccttataggaggcccgggagagctgctttgccccttccagcgtgtgaggacacagtgaggaggtgttgcctatgaggaaacaggccctcccagatggtgaacctgccggtaccttgatcttggacttaagccatctgagctgtgagccctacacttccattctttataaattatccagtccaaggtactttaggaacctgaatggattaagacaaacctgattatgccactccgagatttgaggtaacatttgaatctaaaagaggctatatgaaagaggttataataaaaatgatttttgactaaaaaattgttggcctaagataattcagtagcagggctgaataatgggatgactcaaaatcagtaagctcaaaggcaatttcaaagaaatctttatgtttagcaagaagaccaagatgacaagatgcgccaggagacttggccagaggacctccaggctgacaaagtttccccgaggaagtcagattggaaaagtgtcctcaggttcaaggaaacctgggtgtgcaccgggtgaatgagagtggcagacagaaggaaacagcaaggcctctgaggtaggagggacagcgtttttgaatgtgaaatttattccctgatacatgtttttaaaaatgaatcttgctgcccttagaaaatgaacccccgaacaaggtaaggtcgagctggcccctcgtgtcatccgactttgcgttgtggccctgcctgcagaaacgtgtgctctgctacagccctgggaggaggggccgggctcccaactcctgccccgcttctagcacatgctgtgcttggccacttctctgcctcttagtttaacagcagcactgggcaaggtttgccctctgcacaccagaccggcttcccaagaaccggggaagaggagagggcatgcctggggcctgagcttagtgggccgggtggaggcaggaggtactgcatggaggagcgtggacagtggcatgcaggaggccagtcattctgcggttttagctggaggtttgtttttggtagtttgtagaatcatcagatttgatgatgaaactttttttccataaatgttaaattttcagacacttgtattttttttttccttttttttttttgagactgagtcactgtcgcccaggctggagtgcagtggtactagctcggctcactgcaacctctgcctcccaggttcaagcgattctcctgcctcagcctcctgagtagctgggattacagatgtgtttcaccatgcccggcgaattttttttgtatttttagtagacacgggatctcaccgtgttggccaggctggtcttgaactcctgacctatggtgatccgcacccctccccgccccccccgcggcccagcctcccaaagtgctgggattacaggcatgagccactgtacccagccctgtattttctttaaaaaccaattttgggccgggcacggtggctcacgcctgtaatcccagcactttgggaggccgaggcaggcggatcacgaggtcaggagatcgagaccatcctggctaacatggtgaaaacccatctctactaaaaatacagaaaaaaaatgagctgggtgcgatggtgggtgcctgcagtcccagctactcgggaggctgaggcaggagaatggcgtgaacccaggaggcggagcttgcagtgagcccagatcacgcccctgcactccagcctgggtgacagagcgagactccgtctcaaaaacaacaacaacaacgaaaaaacgattttggcatgttttgtaagttgccagactattggatatacctcttaatcatactttgtttgaaatcctttgtggtttctaaagcactagtagctttctgaaaggaaaatttttaatgaatgaagcatgcttcatcctgcacatcccctcctgccccagcacccctactgcccatgcgcctctcctgccccagcacccctactgccccagtgccaggccttttctagcagctctcatgggttcatccctgctgcgggcattgctccaccaaggggcagtgctctccctgccggtaagtgttggaacttcacgtttccctctagttttctctttacattttaacatacactattatgtgtcaatatattaattatatattaattacatttatagaggttaggtatatatggcagatcatatctgagcgtgaattacattctccaatatttttatttgtcatgatttattgcagggttcacttatttgatctaccccaacttaacacacatttccaagaaaatatccatcacactagaaagaaagaaagaggaaggaaggaagggagggagggagagaaggagaaaggaagaaagggaaggaaaatggaatggaggaagggaaaaatggaaggaggaaggaaggaagggaaagaatgaagaaagccatttgttcctgcaaacctaaacctctttgtagtaagttctggcagaaggtgtgtttctggagttaaactacaggcttggaaatggaatttcttagcctaatttctaaattagaactgcttatgcaaattaacactccgtacatttcaacaagcagttggctgatttcttctgtccactccacctgcagatgcagaggtggccccatcctgtgatgtgccaccacatcccttttcagtgaagggctttgttggctgctgtgggcattctcatggcctctccagggatggcctccactgtagagacctatgtcaccaaggccaggccctctcagggggctccatccaacgaccattctgcctcagggtaagaggcccggccctctcagcctgagtccattctggctccagagctccctgagagcttgcctggcaagttactcttgcaattctagcttccagcaggcgttgatttctggggcacttttgataaactcctggcaggaaactcaatctctgggggtcagagtccacttcctggggagcccaatctgtgacccctaggagtggggaccatggaagcacttggctctccagcatgtgctgaatagggggcgctgcctgcaatgtccacgtggaaacctggctgggagaatgcctgtgtgctctgcatggggatgtaaaggtgtgagcaaaccttcttcagagaggggatgttcaatgcgaaatttgaacattgggacctgaaaaactgatgggctgatggggtctgcccatgattggcagccttcatagaatcacgagggaggagcacaggccaccctagacaggaggggtcccctactgacagggaggtgctgtcggggcagcaggcacgtgcaggaaaacggaaaagcagagtaattgaatgtaaatcatgcaactccactacagtggctagaagcctggatgggcaacttggctgagtgatgttgggcaagttatttaatatcagtattctcagttttctcatctgtaaaggggattaaatacttccttcccttacagggctgccctggtcttaagtaatgcccacagagagcttagcattgttcttggcaagtcactagtactcagtaaatactatttttattaagaaggtaagattcacaggacttagtgtcttaactagatgttgagagtaaggagaagagagaatacttctcggatgattgttcagtttctgatgaatgtctgttcccctttcaaaacctaattcagatgtcacttcctcctcaaagctctcgccccgcgccgagctactgtgatgtatttttatgacctggcagcttttttctcatatccctgttagcggtatgtggtaagaacatgagacacagaatcagaaaccatggatttctggtcttgactccactaccactcagaggaacctcacggtggatgccgtaagtgtttacactgaaaaggattttcacgaaaacctgcattttcatttcgttcacaagagaattatgagactagaaaaacaacaattcttagtataccacagactgtggtgcctaggaataacagacaagctttaactcacacgatgagcatctttatttagctctgcttttagatatctgcatgataaagatgagtgatccaacgttagaaatcatctggacattaaaactgaattgtaggcaggcgtggtggctcacacctgtaatcccagcacttacggagaccaaggcgggcagattgcttgagctcaggagtttgtgagactagcctgggcaacatagtaagacccctatctctacaaaaaatataaaaattagctaggcatcatggcctgtgcctgtagtcctagctattgaggaaactgatgcaggaggatcatttgagctcaggagtttgagaccattctgggcaatacggtgaaaccctgtctctacaaaaaaatgcaaagattagctaggcatgatggcacatgcctgtggtcccagctactcgggaggctgaggcaggaggattgcaggaggtttgcttgagccggggaggtcgagtctgcagtgaactgagattgcatcactgcactacagcctgggtgacagagtaagaccctatctcaaaaaaaagaactaattgtaacaaactatctttcaaattatatcaaaacagtgattcataaattccatgttgcccagagatcatgaggagctcttctatgatttgacagtgcaattactgaaggggaagacaccatgcaaatacatggtaaaaatattcaaattattactgatttgacacaaaatattgatgtaaataacataaaactgtaatatgccattatgatgacattaatgaaaaattggttaatgaatgtcattgaaagagcatgtacatcactaaatgttcttagtcactgaaagtgtgaaatagcctctaaactcatatgtggaaaaagaacttgaaaaaggtttccagaaatgtgacaattctagtactttcatgacattttaaaaaagggattgtaaagactgatgaaacccttaaaacctctcaagaattaaaaatcatttttgatcaacagagtaaactgattttttatctctgttgaaagatatttttaaaatcattgtcctatggaaaagtcatatagaacgtttgctgtttaatgtagcacagatgtatcaaaaagccatgccaggcagttatagatatcttagttttctggattttgtgacgtttgtggtatttgtcagatttttaaaatttgtgatttgttgggatttgttcctcattcacaggtaattttatatacttttgtattcactttcgaaaagaaggcaactctaaattttatgaacttcaagtgctataaaacaattaccacagtaaattttgaaaaattcaccccaaaaagaaaccttgtatccattggcagtaactccctatgctccgccattcctctcagctccctgtctggcaaccacttcctgtctcttcagagttgcctcttctggacattacatataaacggaattatacactatgtggccttttatgactggcttctttcacttagcataatgttttcaagagtcatctgtgttgtagcatttgtcagtacttcatttatttttgtttcctaacaatactccattgtagggattgaccacactttatccattcattggttgatggacatttgggttgtttccactttttctgctgttgtgaataacagtgctaagcacattcatatgcagtgtttgtgtagatatataatatgctttattttctcttgagtacataaaagtggagcctctgagtaatataataactctatgtttggtgttttgaagaattgctaaattgttttccaaagcagctgcaccattttatatccctaccagcaatgcatgaagcttccagtttctccacatcatcacgaatactccttattctctctctttttagatatagacattctggcaggtgtgacattgtatctcttgtggtttagatttgcatttggagcatgtcttatgtgcacttaaaaatattaatatctattctgctgttgttgggtaaactgttctatagatgttgatatggcttcgctgtgtccccactcaaaatctcatcttgacttgtaatccccataatctccatgtgtcaagggtgggaccaggtggaggtaattggatcatgagggtggttttccctactctgttttcatgatagtgagtctcacaaggtctgatggttttataagcatctggcatttcccctgcttgcactcaggctgtcctgccacactgtgaagaaggtgccttgcttctcctttgccttctgccatgagtgtaagtttcatgaggcctccccagccatgctgaactgtgagtcaattaaacctctttcctttataaattaccaagctgcggctatttcttcatagcagtgtgagaacggactaatacaggtgttttttaggtcttgttattgtgtcgttcacgtcttttatttccttgttgatcttactcttagttgttctatccatcattgaaaatggggcattggccaggcgtggtggctcacgcctgtaatcccagcactttgggaggccaagaccagcagatcacttgaggtcaggggttcgagaccagcgtggctaacatggagaactcctgtctctactaaaaatacaaaaattagtcaggtgtggcagtgcgtgcccgcctatagtcccatctacttgggaggctgaggcaggggaattgcttgaaccctggagtcagagtttgcagtgagctgagatcatgccactgcgctccagtctgggtgacagagtgagactcaaaaaagaaaaaaaaaaaaaaaaaaaaaaagaaagaaaatgagacattggatttgtaagtttctgacaggttcattttgcctgctgcccagatagagccgatttatgaggacagggaaattgcaatagagaaagagtttaatacatgtagaactggctaaacaagagactggagttttattattactcaaatcagcctccacaaaaatttggaggctaggtcttttcaaagatagtttggtgggcaggggtttgtgtactaagaaactaaatgtttcttgtgtactaagtcagcttctgggtgggggccagaggaccagttgagccaagaattcaagaggtacaggttcaagtagggccatctggttgtcagaaatgcaaaagcctggaaagtcatctcaaatgttaggttctacaatagtcaagttatttatagtaattgggaaagttgcaaatcttgtgacctctgtagaaaataggtggtaatctttacacctatatcttagtagaattcaggcccctcacttcctcctaacctggtagcctttcattagttttacaaaggcagtttaattttggggggcagggctattatcatctaaactataaactataatcgtttgtcccaaagttagcttggcccatgcccaggaatgaccaagggcaatttggagattaaagtcaagatggagttggttagatcagatctctttcactgttataattttctcactgttaaaatttacaaaggcagtttcaaaatctgaaacttttattgttaaattatgtatttattcctttagttctgtcatgttctgcttcttatattttggaactctgttgttaggtgcatacatatttataattgttatatcttcctgatggattggtattgtaatcactgtaaaatacactattatcattgtaaaatattcctttttatctctagtattttttgtctgtttgacttaaagtctattttgtttgatattagcatagctattcttgctcttactgtggcaatttgtatgatacctttttcttttagcctatttatatctttgaatcaaaagtttgtctcctgtagatagcatatagttggataatttttagttcttttgattggattgtttaattcattcatttttagtgttactattgatatggctggatttgtgtctgcaattttaatttttgttttctatatgtctcgtgtttttgtggctttgcttcttcttctttgctttcttttgcattaagtattttctagtttaacaacttaatttcttaaattatttttaactatatttttacgtatttccttaatgaatgcttgatggctcacaatctccttctcagtttatcagaatctacttaagtttatactaacttatgtccagtgagatagaaacacatttcttctttatagctctaggtcctcttcacttgtttttgtgctattattgttatacttactacctctgtatatgttacaagcccaagaatactattctacttatttatataattttatgttttttaaagaacctgagactggaagtgagggaaatagggcgtgcaggaaggaaggaagaggaaggaaaagtgtgtgaaagggggctccacctcctttagtggataccctgagcttatttccaggggcctttgtaaattcccagtgacaactctttggaagatgaaatccccctcttccctgcatcttattagaacagtgtatcctggaggacatcccttgcctttcaccaagtgaccctatactggcggcagaacttctcgattttgcggatttcaaaatggctccacgtactcatagttttcatgacagacttcattgcgatagtcaaatactgttccacttactgcagttgcctacagtctgggttttgttcagttgaaattaaataaattttatgcacaaacctttcatggctgtctgcgatcttttaaaaaatgtgaacatgtacaggatgataagttctaaggatgtatgttctgcaaagcctcagagcaggaagtagaagtacacttgtacattagaagatgaatatgcttttggagtttggactccattttctttttttgttctttctttctttcttttttttttttttttgacagaatgttgccctgtccctcagggtggagtgcagtagcacgatcttggctcactccaaccctgctttctgggttcaagtgattctcatgcctcagcttcccgaatagctgggattactggtgcccaccaccacgcctggctaatttttgtatttttagtagagacggcttttgccatgttggccaggctggtcttgaactcctgacctcaggtgatccacctcaacctcccgaagcactgggattacaggcatgaaccaccacgcccggcctggaccctgttttctacattttagcacacatattcctatagagagatgtacataacccactgacataccagggaacttttgaaatgtaacctttcaaaaactgaagcttgagaaactttgttttgttgtactctgtatcaatggaggaggcatgtgttctataattgataatagttaatgaatgtcttctgggcttcattgacccatacattaccttaaaatcaaatgatgatttcttaaagtctagacattccctagaaatgggaacattctgagttttaagtgctaagtcagaataggtgttaaaatgagcctttggaaaaacagtttgtcagtttgcacacatctatgttttaggtgcaatagcaaataaacacagtacatgaacgaatgagtgctcatgggaaataagaggtggtcttatctaaagggaagtactgtgggccatggtcggaatcctagggttccggatcctgccatgccactcgctggcagcctggttggcttccccgggctccacctttcaccagcgggagcggaactgtttctcattgtttccactctgggctgttggagccccagggctctcagggtgtttcagggggctgtggacagggagaggaacagcacttttcccctaagatttacaaagagcaattctccttaaacaactggtttaggaaaagctactggactaagttctcccagccccaactttctggcactttagaaactgtccatttccaccgagtggctggcctcagttaggattgcagtgagcaagctgcctggatggtgtgatcacctgggaaggaaagcaaagctttctagagaagaccagtgggacctctgtgttgccagctgaacgtgttctgaggtaacatcaaatcctgatgctctggcagaccgttcaggcctctgttagaagataagcgtgcctgctcatgtctagggaagctgtgttcaaagtcagtgaaagtgatgactaaaattattttatatcttaaaaacacctcctctcccaaaatgctaaaactactttgtttttctacttctaggtaggtatttaaatcagatcatctacataaaataactactagcagcaaaaagaaaaaataggtcatttatccagctcatattttcaagtcaaaccacttgagttgtgggagtggtttatcagcagctatttccacctctttgaaaaagagaaacaaaaaacattgccatgggcttagaaaaatatttggcaatgcatctcctaagaaacagtggaaagcctttcatttatttttctttcttttctttcttttttttttgaaacatagtcttgctctgtcgcccaggctggagtgcagtggcgcgatctcgcctcactgcagcctctgcttcccaggttcatgtgattctcctgcctcagcctcctgagtagccgggactacagttgcgctaccacgtctagctaatttttgtatttttagtagaggcagggtttcaccttgttggccaggctggtctcaaacacctgatctcaggtgatcctgcctgtcttggcctcctaaagtgctgggattgcaggcgtgagccactgcgcccggcctacatttatttttctactgaggaaataagttgagggcttagaagacttggaaaaaaatatgggtttttagaggaaaatagtgtttaaatgagcaactttacaagaacaacgatttggttgatttctcgaggtgaagtgaagatggagacggaaagtggcagagcccaacagaatgtgaaagacagaatccagggccaggaggagaaagttcaacaaggagaggaggagctggagacaggggaggaggaagggcaggagaggacacgctggacacggtgggggtgagcccactgcgagtcagtgctcccaaggggaaagaaagcgaacagtaatggatttctgcgctcattgcaataattggggttttttggctgctcttatcagaaggggctatcgaccgatattgctgccatggcattcatgtgtcaccaccacgcacaatacccttatcacttctatcagtgattgactttactgtatttattagtcacagaagcctcctgggaggaaatattctcaactgcactggtgtggaaaaaataatctcttcttgtaaggtgcttgcttcaggactgaataaaatcctgtagactttccacatcctagttctgagaatactgtaatacatatggaatacagttattcctgagtacccatggggcttggtaccaggacgcctgaggataccaagtctctcatatgaaatggcatcatatttgcatgtaacctatgcaaatcctcctgtgtactttaaatctctattatgatatctaatacaatgtaaatgctatgtaaatagttgtttattgttttttaacttgtatttttttattgttgtatcaccttttgttttattcttttaaaatatcttggtctatgattggttgaatccacagatgcagaacccatggatacaagggctgactgtatatgcataatatatagaaagcataatatatacagaaatgaatgctcaacagattatttttataggtgatgtttacctcccaacctaaataattttctaaaactgagttgaagattttcagaattctcagagatttatttgtgtattgaaaaaggagctctctctctatacatttaaaaaaaaattttttttttaggcagaatcttactctgtcgcccaggctggagtgcagtggcatgatctcagctaactgcaacctctgcctcctgggttcaagcgattctcccgcctcagcctcctgagtagctgggactacaggcaagtgccaccacacccggctaatttttatatttttagtagagatgggatttcagtatgttggccaggctagtctcgaactcctgacctcaagtgatctgcctgcgtcggcctcccaaactgctgggattacaggcatgagccactgcagccggccgcaaaaacttaagttatatgaaatatttaaattatcttgataatacttaaagccttcctgtgagatggaatatagagccaagctgtatattctcaagctctaacttccaggattcctaattgttttctacaaaccatagtattgcagacactatttaatataccatatgttctcatgagcatttgagaacatatatatatttgcagaattaataacttttccttaattgtgtgggcttgaagaagtagtagaaatataggccaccatagagtgcagaccagaataggaagccttgcagaagattatcttgccatttctctccagggtagctgaattttccactgtggtttgacttctgtggtttcagagctaatgtgtgcactgagagtgtgtactgttatgtaacagcaaccatactgtggatgtgcttgtctgtcagtgcccactcatacttggataaagtaaaaccctggttaatgagctgactcagagacgggtgctctcattaattgaattttcttcttaaatgaaatatttggaaactttattattgaatacatatttaaaatgcaagcacattcattagtacacttcataattattctttaatgatttaactttttaatgacttaagaccttttattaatcagggtcatcatcctaaatatcagttattgtttaatacttcagctgttgccataggagagaagagaaagtcctgcatgaagcctcccaaggctgctgtttcccagctgttaacttgtttgtgacctttgggttacccttagtccatagagaatgggggaaccaggagtgggaaagagcctgggtgctgaattactgtgtggagcagattctcctcctcagaaaagctgattagatgattgggtttttatgtgtgtaagaaggttctagtgtgcttagtcactgagattttaacttacacctcaattagcatatattttccattttctaagaatcataaaatatcaggctaaatgtgtgccaggagattctcagcaaagagagaagacatcaagaaaactaagtggaaattggaactaaaaattcaataaatggaatagattctcactggatggatttgttgataaaaagagccaaactctgtaaaatatttgaagaggtttattctgagccagatgtgagggaccatgacccatgacatagccgcaggagatcctgagaacatgtgcccagggtggttgggttacagcttgatttggtacattttagggagacagaaattacaggcaaagacataaatcaatacatataaggtttacattggttcagcccagaaaggagggacatctcaaagtggagtgggaggcttccaggtcataggtagattcaaagatttcctgattggcaattggttgaaagagcctaatgagttgaagtcagcagaaataaatgtttggggttacggtaaggtgggttgtggaagccaagattcttgttatgtagatgaagcctccagatagcaggcttcagagacaatagatcatcagactttaaaagttgccaggctcttagttaaatctctctggatcaaaaaaaggactggaaagggaaggggacttggtacagaaagtaaaggaatgaaatggcctcttaaagatgtttctcgtctttgcaagagacagtttacaggcccacttcaaaatacgttgaagaaatatattttggagtaaaatattttttgatttctggagtaaaatatttttgatttatttcatagcctgctatgtcatgtgatgtggaatttggtatcttactggtacaaagagcctattttgttattcttaaggtctctgttttgcctgggtgcggtggctcacacctgtaatcccagtactttgggaggctgaggcaggcggatcacctgaggtcaggagtttaagaccatcctggtcaacatggtgaaaccctgtctctactaaaaatacaaaaattagccctgtgtggtggtgggcgcctgtaattccagttacttgggaggctgaggcagggtatcacttcagcccaggaggtggaggttgcagtgagccgagattgcgccattgcactccagcctgggcagcaagagtgaaactctgcctcaaaaaaaaaaaggctctattttattgttaatgccagtcagctgtgccagaacttcaaagggaggagagtataatgaggcatgtccccctgccccgccactcccccttcacatcatggcctgaactacattttcaggattttttggaatgcctttggccaagagagggagtccattcagtcggttgcagggtttagaattgcatttttagttgacaggttcaaaaacacaacaaagataaaagaggaatgagtcagctaacttgaagacacaccaacaaaattatccaattgaacaacagagaaagaaaactaaaaaaaatgaacagaaccagataattttggattactaccaaaaggcttagcatttgtattattggaatactaggagaggatgagaaagaatgagtacagaagaaatatttaaagaaataatggtgaagaactttccaaatctagcagaaacgcttaaacctacagattcaagaacctcagcacccccaaacaggataaatccaaataaatccatgtctagatacatcaggatcaaactactgaaaactagacaaaaaaagttttgagaacagccacagtaaaataattcattacttattagagaaacaaggattcaaagggatgctgatttctcattagaaatcatgaagaccagaaggaagtgctgaaacaaaggaactatcagctagaattctgtatccagggacaatgtcttccagaaatgaaagtgaaatcaagatattcccaaattaaggaaaagaaagaaaatccattggtaggaggtcttttctaaaaaactgctaaagaaagtttttcagtcaaaagagatgtgttatcagagaaaaacattaaacatcagaaatggtaattatataaggaaatataagactgttctcttgggttttaaaaatgattataatttgatggttgaaatcaacaattacaatatctgttggggtttccaatgtatgcatcgtatgtagatgtaatatgatgaattatttttactcctaacacttctggcactaaatacatgtttttgttttcacaccagcaaccaattctccaactcgctggatgccaactaggtgtccagcaattcaatttaattctgacactgactacctagagttagtgtcaaaacccacaggttaagggcccagtcccacaagaatgtcccacttcaaattttaatcacaacttccagttcttctacatttctgaccaactggctccaaatcgggaattttcatgaccccccgccccttgtggtcaataatttgctagaccagcccacagaactcaggggaaacagtttatttaccatattgttaagtatgtaaataaacggccagatgaagaggtacatagggaaagatccaaagggttcctgagcgtaagagttcctgtcttcatggagttggggtgcacctcctatctggaatgcgaatgcatttgctgacctggaagatctccaaacccttttactaagggctttttgagggctctcctacaaaaacatgattaattaaatctggccattggtgacttagtatccacctcctctcccttttccagaggttggagggggaggtggagctgaaagtccaaccctctgattatagagttgttttgtctgataaccagaccccatcctggagccatctgggggcctaccaagagtcatcttactagcataaactcaggtatggttgaaaagggcttattgtcaataacaaaagatggttctcccactcctatcactcagaaaattacaagaattttaggagctctgtgccaggaactggggataaagaccaaatatatgttctttattatatatagctggacacccagttggtgtcagaagagttgaaatattgttcactggtgtagaaaaagcccacatattggtgtcatacatgttagaagtaaaaacaatgagagataaaggtacccatatgatgcttagctttctccatttaacttgaagtggtaaaatattgattctaagtagactgtgaaaattttgttaactgtgtaatgtaattccttgagtaaacacttttaaaactatgaaaaaatacatagttaaatatacaacagataagtatagtatgctacaaaatgtttgtataattggaaagaaggtaggaaagagaaaacaagaatgaaaaacagaagataaaacaaaacaaataacaaaatggtaaacctgaaggcaaatacatcaatgctaacagacatctatagagcacgttagccaaaaacaaaatattcatttttctatatatatacacgaaaccttctccaggatagattatatgttaggccaaaatcaaacttgaatatatttaaaaggacagaaataacacaaagtatgttctccagtcactttggaataaaataggaaattaataacaggaaaaaatctgggaaactcacaaatatatagaaatgtaaagacacactcctaaataaccaatggatcaaaggagaactcaaaagggaaatcagaaaatacttggagatgtatgaaaatgaagataaaacacaccaaccttatggaatccagtgaaagcagatgagggcttagaggacaatttatagctgtaaatgcttatatcaagaaggaaaaaaataaatcaataagctaatattccacttaaagacactggggaaagaagagcaaactaaatctaaagcaagcaaaatgaagaaaataaagattaaaatgaaaaataatgaaatagagaatagaaagacaatagaggaaatcaataaaattaaaaaactggttctttgaaaaaaatccaacaaaactgacaatcctatagctagactggccatgaaaaagagaagattcacattcctagcatcagaaataagagaagacattatttctgaccttgacagaaatacaaagggttgtaaaggaagaatatgacagcaattgtacatcaacaatgaaataacttagataaagtgggaagatttctagaaagatataaactaccaaaactgatttaagaaaatatcaaaagtctaaaaagaattataataatcaagattgaatagctaagcaaaaaatctacccacaaagtaaagccctgtatcaagtggtttcaccacggaattctactaaatttttttttttttaaatgaacaccaattctttacaaattctcttaaaaaagaggagggaatactttacaattcattttatgaggctagttgccctgataccaaaaccagacaaaaacctcataagaaataaaaactaaagatgaatatatcttatgaatagatgcagacatcatgaacaaatactagcaaaccaaatccaacagcatataaaaggaaatatccaccatgaccaagtggaatttttatcccaggaatgcacagttgattcaacatttgaaaaatcaattaatgtaatgcataataacaacagaataaatacaaaaattacatgatcatttcaaaagatgcagaaaatacatttggaaaaatccacactctgtcataatataaatactcaagaaactaggaatagaagaaaacttcctcaacctgataaaaggtaactataaaaaactcactgctactattatccttaattgtgaaaacatggatgctttccctcaagatgagaaataagacaaggatgatcgctctcttcacttatatacaacattgttctagaagttctagccagggcaattaggcaaaaataaaaagaaaaagccatcagtttggaaagaaagaaataaaactgtagatgttatgatcttgtatatataatagtctaaggaattcactttaaaaaaactattggcactaacaagctcagcacgggtgcaggatatgagattaatatacaaaaatcaattgtgtatttttacatatttgcaatgaacaatctgaaaatgtaattaaaaatatttgtttatgatagcatcaaaaataaattcttaagaataaatttaacataaaaattgcaaaacttactatactctggaactataaaacataatgaaaaaatcaaagatctaaacaaaaggaaatatatttcatattcatggattagaatacataacactgttaaaatgacaatactccccaaatcgttacacaggttaaaagcaatccctatcagaatcacagagattttttgcagacatcgacaaactgattcgaaattcatatagaattgcagggaatccacaatagccaaaacaatcttaaaaatgaagaataaactaggactcatacttcctgatttaaaaatttactacaatgcgatagcaatcaatcaagacagtgtggtactggcataaagatagaaatacaaatcaatggaatggaattgagagtctggaagtatatccatacatctgtggtcaactgagttttgaaaaaggctccaggaccgttcaatggggaaagaatagtcttttcaacaaattatactaggtggaatggatagtcacatccaaagaatgaagcttgatccttacctcacactgtataaaaaattaactcaaaatagatcaaagatctaaatgtaaaacaaaaaaactaaaactcttagaagaaatctattagttagggttccctagagggacagaattaataggatggatgtagatgtaaaggggagtttattaaggagcattaactcacacaattacaaggtgaggtcccacaatagcccatctgcaaaccgaggagcaaggaagccaatcccagtcccaaagctgaagaacttggagtccgatgtttgagagcagggagtatccagcatggaagaaagatgtaggctcagagggtaagctagtctagttttttcacattcttctgtctgcttttattctggctgagctggcagctgattagattgtgcccacccagattgagggtgggtctgcctttcccagacccactgattcactgattaactgattcaaatgttaatctcctttggcaacaggctcacagacacacccaggaacaatactttgcctccttcaatccaatcaagttgacactcagtattaatcatcacaagtccaccccttgtcaacttgaacccatacacatctcctgaaatcatacataatctgcaaataaagacaataataaggtaataataattatgcctaacataatacaaccatccttcatacaaccagaaacacaccaatccccaattcaaatgctattacataaagttaacaacatttaaatgttgatatgaagtcaataaatcttatgtcactaaaggaaaaaggaaataaaatgaagatattttctttttttttttttttttttttgagatggagtcttgctctgtcacccaggctggagtgcagtggcgcgatctcggctcactgcaagctctgcgtcccgggttaacgccattctcctgcctcagcctccccagtagctgggactacaggcacccaccaccacacctggctagtttttttatatttttagtagagacagggtttcaccatgttagccaggatggtctcgatctcctgacctcgtgatccacccgcctcagcctcccaaagtgctgggaatacaggcgtgagtcaccgcgcccggccaatgaagatattttcttagtacaagtgtatacatgcacaaacgtgttcttaacgaaggaggaaatactcatgacaattacagtccttgtttttgcagctggtcatgtggtcatagctggtattgatgactaccttcttctactacccattttgtattccctttgccttcagcaagcacctcaggaggtcgtggtttttttcctggtggagtgacccaaaccttcattcctgaagagtctgagccatttatagtcctgcctggattgggctgttgtagtttcccattgaccttaatcatagggcatggtaatactaagagatgccctagtggatctcctgtattccacacatactcttcgttacctccacggtggagtgaaattagtagtgaaattaatagtagactaatttcatcttgatagttcgagtcagtcaccccagccaacactgtaactcccttctcttagcctgttgacttaaaggtaggagtagcccaaagtgtccaggtggcaatcttaacttccagtttaatggaattgttgttatgtctcctggtggcagtgttccttcttgtggaactaagactcctaggccagcaggatgtaatgctgtgggaacaggaagcaaaaattttgctagtggatcactaggggtgatggtgagtggtgccacttccacttccactccttgattcctagacttgtgaattgcagctatgggagaaacagtaccatatattggatgctgattcagagcatacacagccttctggagaactttgtcctggccctgcaaactgttgtcacctagttggcattgtaattgtgacttcaaaaggccattccactgttctattaatccagctgcttcagtatgagggggaacatggtaagaccagtgaattccatgagcatgagcccactgtcacacttctttagctgtaaagtgagtgcaatgctgtgtggaataccatcacagtgaataaagcattttgtgagttcacagttggtagttttggcagaagcattgtgtgcaggataagcaaacccgtatccagggtaagtgtctattctgatgaggacaaagtgctgtcctttccatgatggaaatggccagtataatcaacctgccaccaaccagctggctgatcatcccaaggaatggtgccatattgacagctcagtgtttagattagatggtgcccattcagattgagggtgggtctgcctttcccaatccactgactcaaatgttaatcccctttggcaacaccctcacagacacacccaagaacaatactttgcatccttcaatccaatcaagttgacactcaatattaaccatcacaaaccatacagagaaatctttatgactttggatttcgcaaaggatttttagatatgataccaaaagcatgaggaacaaaagaaaaataaatttgacttcattaaaattaaaatctttgtgacccaaaggacatcaagaaaaaacatgaaaagaacaacccaaagaatggtagagaatatttgtaaatcaaataaggtacatgcatctagaatacataaacaactcttgcaactcaataataataaaccctaaataatccagttgaaaaatgggcaaatatctgaatagatttctctaaagaagataaacaaatggacgacaagcacttgaaaagatgcttgaatattagggaaatgcaaatcaaccaaatacaacttcctatccactaggatggctagaatgaaaaggtcagataatcacaaatgctgataaggatatggagaaatcagaaccctcctacactgctgctgagaatgaaaaatatcatagctactttggaaaacagtttagcagttccttaaatgattaaacatagagttaccatacgaccaagtaattccactcatagctatatatccaagacaaattgtgaagacaaattgtgatattgtgaaatatacatttggtatttgatccaatttcctggcatacaacttctgaaatccttagtatctccaaagtgatgtctttttgtatgctaatgattggctgatggttggcttctcctaggtagcttcaggatgggggctggttaacagaaagaccaaggcaaaattaggaggtcgaaactttcagctcactcctagctccagggaggggagaggggctgaaggttaagttgatcatcggtggccaacagtttaataaaatgtctacataatgaagcctccataaaaacacaaaaggacagggtttggacagcttctgaatcacttagcatgtggaggttcctaaagagtggagcacctggggaggacatgcaagctctgagcccattcctcatacctcaacctatacatctctttatctgtgtcttttgtaatatcctttataataaactggtaaatgtaagtaagtgtttccctgactcctgtgagctgttctagccaatttatctaatttaaagagagggtcatgggaacctcaacttaaagctggttggtcagaagttccagaggcccagacctgcgactggtgcctgaaggtggtgacagttttctgggactcagccctcaacctttgggatctgacactacctccaggaagagtcagaattgaattggaggacaccagcccactgcagaactgattgcttgcttggtgtgtggagaaaaccctccaacatttggtcacagaagtcttctgtgttgattgcagttatgctgtgagaatatagaaaataaacagtttgtgttttttccatttacaaatagcatgaccacaaaataactgctgcacggatgtttatagcagcattattcataatagccaaaggtggacacagcccaaatgtttataaatgaagcatgaaaaaagtggtatatccattatttggccagaaaaaagaataagttactgatacatgctacaacttggatggaactcaaagcccacatgtatatatccattcctatgagagtccagaataggtaaatctatagagacaggaagtaggttagtgattgctgcttaggaatggtgggggtgaggatgagctgatgagtgctaaagggtatgatgtttctttttgagatgaaaatgtcctaaagttgactgtggtgatggttgtacaactctgaatatcctaaaaacccactgaatttgtagtagagacagggtttcaatatgttggtcaggctggtctcgaactcctgacctcaagtgatccacctgcctcggcctcccaaagtgctaggatcacaggcatgagctactgtgctgtggtggcaggcacctgtaatcccagctactcgggaggctgagacaggataatagcatgaacccaggaagctgaggttgcagtgagctgagattgtgccattgcactccagcctgggtgagagggcgagactccatctcaaaaaacaaaacaaaacaacaacaacaaaaaaacccactgaattgtatagtttaagtggaaagacaacttaaaagaccaagaaattgtatggtatacaaattatatctcaataaagttgttaaacctaaccctaaaaagaaaaaaaagcaaaaaataaaggatgaaaaagatatactgtgtaaacacaaatcaaaagaaagctgggtgattagtatcagacaaaatagatttcagagcaaagacaattaccagggattacaagggacattacctaatgacagaagtgtcagttcaccaagaagacacctaacaacagaacttcaaattgcacaaaagaaaaactgacaaaattgaaggtaaagaacgaattcacaataatagttgaatatttcaacatgcctggcttagtaattgatagaaccataagcagacaatcagcaaggataaagaagaggcaaacagcatcaccattcagctggaccatattgacaattgtggaccacttcacccaacaacagcagaataaacgtgcttttcaggtgcacatggaatagtcacatacacagagcacatcttacgttattaaaagacacttaaccaatttaaaagaactgaaaaatatgaagtatgtttctgcccacataattttaaatcagaaaataactaaatattttaatattatcacaagataatattctttaaaaatttttttattttaatagttttgggggaacaggtggtatttggttgcatggaaaagttatttagtcatgatttctgacattaaggtgcacccatcatccaagcaatgtacactgtacccagtgtgtagtctgttatccttcagcctctcccaccctttcccctaagtccccaaagtccattatatcattttattcctttgcgtctttatagcttagttcctgcttataagtgagaacatataatgtttggtttcccattcctgagttagttcacttagaataatggtctccaactccatccaggttaccaaaaatgccattattttgttcctttttatggctaagtggtattccgtggtaaatatataccacattttctttatccacttgttggttgatgggcatttagactggtgtatatttttgcaattgtgaattgtgctgctgtaaacatgtgtgtgcaagtgtctttttcatataataacttcttttcctctgggtagatacccagtagtgggattgctggatcaaacagtagttctacttttagttctttaaggaatctccatactgttttccatagtggttgtactagtttacattcccaccagcagtaaaagtgttcccttttcaccacattcccaccaacatatataatattattttttgatttttaaggtatggccacacttgcaggagtaaggtggtatctcatgtggttttgatttgcatttccctgacagtgatgttgagcattttttcatatgtttgttagccatttgtaaccatttgtgtatcttcttttgagaattatctatttcagtcctttgcccatttcttgatgggattattatgtttttcttctgatttgtttgagttccttgtagattttggatattagttctttgtcagatgcatagtttgtgaatattttctcccactctgtgggttgtttgtttactctgctgattatttcttttgctgtgtagaagcttcttagtttaattaggtcccaattatttagttttgtttttgttgcatttgcttttgggttcttggtcataaactttttgcctaagccaatatctaggagagtttttctgatgttatcttctagaatttttattcttatttttaggtcttagatttaagtctttgatccatgttgagttggtttttgtataaggtgagaggtgaggatctagcatcattcttctacacatggcttgccaattattccaacaccgtttgttgaataggtgtcctttttccactttatgtttttgtttgctttgctggagatcagttggctgtaattctgggttctctattatttgtctttatttctgggttatctattctttgccattggtctacatgcctatttttataccagtatattttattaactatggccttgtagtatagtttgaagtgaggtaatgtgatgcctccagatttgttctttttgtttagccctgctttggctatgtggttcttttttggtttcatatgaattttagaatgtttttttctagttctgtgaaaaataatgatagtattttgatgggaattggattgaatttatagattgcttttggcaatatggtcattttcacaatattgattctacttatccataagcataggatgtatttccatttgcatgtgttgtctatgatttctttcagcagtgttttgtagttttccttgtagagatctttcacctccttggttaggtatattcctaagtatttctttctttctttctttttttttttttttggcagctgttgtcaaaagggttcagttcttgatttgatgctcaccttggtcattgttggtgtatagcagtgctactaatttatgtacactgatacattgattttgtatcctgaaactttactgaattcatttattagctctaggagctttttggtgagtctttagtgttttctaagtatataatcatatcattggcaaacagtgacagcttgactttctctttactgatttagatgcccttgatttctttctcttgtctggttgctctagctaggacttccagtactatgttgaatagaagtggtagaagtgggcatccttgtcttgttccagttctcatgggtaatgctttcaacttttcttcattcgatataatgttggctgtgggtctgtcatagatgtcttttattaccttgaggtatgtcccttctatgctgattctgctgagggtttttgttgttgttgttcttttgttttttgttttttgtttatttttttgtatttttagtagagacggggtttcactgtgttagctaggatggtctccatcaccttacctcgtgatccgcctgcctcggcctctcaaagtaagtgctgggattacaggcatgagccaccacacctggccctgcttttttttttttttagacggagtctcgctctgtcaccaggcttcagtgcagtggtgctatctcggttcactgcaacctccgcctcctgggttcaagcgattctcctgcctcagcctcctgggtagcggggactacaggcgtgcgccaccacgcccagctaatttttttttttttgtagagatggggtttcaccatctctacatctacatgttggattttgtcaaatgctttttttgcatctattgagatgatgatatgacttttgtttttaatttattctgtttatgtgatgcatcacatttattgacttgcatatgttaaaccatctctgcactcctggtatgaaacccacttgatcatgatgtattatcttttttatatgctattgtattcagttagctagtattttgttgagggtttttgcatctatgttcatcagggatattggtttgtagttttcttttttttgttatgttttctcctggtttttgtattagggtgatagggttttagtggcttcatagaatgatttagggagaattccctctttctttatcttttggaatagtttcagtaaggttggtaccaattcttctttgaatgcctgatagaattcagctgtgaatccatctggtcctggactttttttgttggcaattttttattactatttcaatctcactgcctgttattggtctgttcagagtttctgtttcttcctggcttgatctatgtgagttgtatatttccaggaatttatacatctcctctagattttctagtttgtgcacatgaaggtgtttatagtagccttcaatgatttttctgtatttctgtggtattggttgcagtagctcccatttcagctctaattcagctatttcagttctaattgatcttctctcatcttttcttggttaatcttactaatggtctatcaattttgttttattttttcaaagaaccagcttcttgtttcatttagcttttgtatttttttttgtttcaattttatttagttctgctctgatctttgttatttcttttcttctgctgggtttgggtttggtttgttcttgtttctctagttccttgagatgtaaccttagattgtctatttgtactctttcatagtttttgatgtaggcatttaatactgtgaactttcctcttagcaccacttttgtagtgtcccagaggttttgataagttgtgtcataattatcgttcagttcaaaaaaatttttaatttacatcttgatttcactgttgactcaaagattattcaggaacagatcatttaatttccatgtatttgcctggttttgagggttccttttggagctaatttccaattttattctgctgtagcctgacagggtacttgatataatttcaattttctttaatttactgagacttgttttgtggcctatcatatggtctatcttgaagaatattccatgtgctgatgaaaagaatgtatattctacagttgttgggtagaatgttctgtaaatatctgttaagtccatttgttttagagtacagtttaagtccattgtttctttgttgcctttctgtcttgatgacctgtctagtgctatcagtggaatattgaagtcccccactgttactgtgttgccatctatctcatttcttatgtctagtaataattgttttataattttggcagctccagtattatgtgcatatatatttaggattgtgatattttcctcttggaccagtaattttatcattatataatgtccctctttgtcttttttaactgttgttgctttaaagtctgttttgtctgatataagaataggtacttctgcttacttttggtgaccatttgcatggaatatgtttttccacccctttatcataagtttatatgagtccttatgtgttaggtgagtctcttgaaaacagcagatacttggttggtggatttttatccattctgccattctgtaccttttaagtggagcatttaggctgtttacatttaatgttattattgagctgtaaggtgttgttttattcattgtgctagttgttgtctgaataccttggtttttgttgttgttgttgctcgttgtgttattgtttagttcctgtaagatttatgcttttaggaggttctattttggtgtgttttgaggttttgtttcaagatttagaactccttttagcatgtcttatagtgctggcttggtagtggtgaattatctaagcatttgtctgaaatagactttctttcttcttcatttttgaagcttagtttttctgcatataaaattcttgactagaaattattttgtttagggaggctaaagataggaccccaatcccttttggcttatagggtttctgctaagaaatctgctgttaatgatgggttttcctttatacattatctgatgcttttgcctcacagctcttaagattctttcctttatcttgactttagataacctatgatgactaagtgcctgggttataatcattttgcaatgaatttcccaggtgtcttttgagcttcttgtatttggatttctaggtatctattgaggctggggaagttttcctcaattattatctcagatatgttttccagacttttagacttctcttcttccttgggaacaccaattattcttagatttttcatttaccataatctcaaatttcttgggggctttgttaattttttaaagttattttttatttttctttgttggattgggttaatttaaaagccttgttttcgagccttgagtttcttttttctacttgtttgattctattgttgaaactttccagtgcactttgtatttctctaagtgtgtctttcatttccaaaagttgtgattattttctctttatgatacctatttctctggagcatttttttctcccaatcttgtattattttttaaatttctttaagttggtttttacctttctctagtacctccttgagtagcttaataatcaaccttctgaattcttcatctgacaattcggagatttttttttcttggtttgatccattgctggggagctagtgtggtctttttggggtgttatagaaccttgttttgtcatattaccagaattacttttttgattccttctcatttggatagactatttcagtggaaaaatctggaagtcaagggctgctgttcagattcttttgttccacaggatgatcctttgatgtggtgcactccccctcaccctagggatagggcttcctgtgaaccagattgcaataattgttgttgcttttctgggtctagttacccagcaggtctactgggctttgggctggtgtctgcaaagagtcctgtgatgcaatccatcttcaggtcccccagccatgaatacagcacctgctctggtggaggtggcaggggagtgaagcagactgtgtgagagtccttggttgtaggtatgtttagtgtgctggctttctcaaatgctgacaagatactattcttgagctatcacaagagcatctttaaacacttagaaattaaactgtacattacatagtccttgggtaaaagaggaagtctcaacagatgttggaaagtattctgaactgaatgaaaatgaaaatatatcaaaacacatgggatacactaaagcagtacttagcagaaaacataaagcattcagtgcttatattagaaaagaagggatttaaatagaatcttattcaaaaagaagaggaaaataaatgcaaaaatgataaaaaccaaaatcaatgaagttaaaaatagaaaaacaatagaatcagtgaaaccaaaatctcattctttgaaaatatcagtaaaattcattaagctctagcaagacaaaggaaaatgagagaagacagaaattgctaataaaatgaataaaataccaaatctcacgatagaccccataaaaaggctcataaaggcataccatgaaaactctttacacatgaaattgatgacttgggaaaaatgtctaaattccttgatagatacaaattaccaaaatttactcaagaaggaataggtatcctaaatggtcctacgtctattagagaaattaaatttgtttaacagcaaaatctttcaaataaggaaactctagatccagatgattttactgattaactctaccaatcatttaaagaagaaataatagaaatccttcacgaagtcttgcagaaatgaggaagagggagcacttctcaacagacaccaaaccagacggacagtgcactaaaataaccccccaacacccatgtccctcataaacacagatacaaaaatgtggaaaaatattagcaaatgaaatccagcaataggtaaaattaataatacatggtgactacattgagtttttctgggggagtgctagggtggctcaatatttgaaagacaatgccatccaatatgttaacattctaaagaaacaccaccttatcatgccaatttatgtagaaaaatcattcatttgataaaattaaacagccattcatgataaaattctcaacaaactaggaatagaagggaatttactcaacctgatagaggatgtccacaaaaaacctacagctaacatgatggtggaggaatgaatgctttccttccaaagctgtccattctcatcactcctgctcaatattgtactggaagtgataccctgtgcaataaaaaaaagaaagaaaagcttacagatttgaaagaagatacaaaactgttcctactcacagacttggtgattttctatgtagaaatccttggccttaggattccagacaaccttgatccccctccaatttctcacactgttcactcagtgtattcagctagtgtttagctctgtgacaaagattctctgtcacctgggtcagaggaaactagagctgactcagggtccagctggttctcatgctttacatccagtttgctcccttctttcccactcgacatccattttcgttcctgactgcctgccctgccaacctgaagcaccagcatcaaatggagagaaaacaaacttaccttccgaatagattttctactggttttgcttctctggttaaactctgagacagttatttaatctctcagtttcattatctaaaaatgggaaatcatacctatttaatcagttcaatcagttcatggtttttggtttttttttttcctttttgagatggagtcttgcttgatgcctaggctggagtgcagtggcgtgatctcagctcactgcaacctccacctcccaggtttgagtgattctcctgccttagcctcctgagtagctgggattacaagcacaagtcaccacgcccagcttatttttatttttttgtgaggacggagtttccccatcttggccaggctggtctcgaactcctgacctcaggtgatccgcccgtcttggcctcccaaagtgctgagattacaggcatgagccactgcacccgaccatctcatgtttttagaaacatacttgctaggtatttttttctgttagagaaaagggatctacctgtctccctgtcttccttccttccttccttccttccttctttccttccatcctcccttcctccctccctccttccttccttccttactcccttccttcctctctccctccctccctcacttccttccttcctctctccctccctccccctttccttccttccttccttccatcctctctccctccctcccctttccttctttccttccttcctttttttgcttcaaatgacatgagaagaatgatttagtgttccatcgaacgtttatccaaaagtagcagagagttatatttaaatggcaacattagttcaccatttctgcccagtagaacttgttcaaagacatcagaaaacctcccctttctgaaggagtcacctggacagtccacagaccccagccatgatcagagcatctcccagtgtctgtccctgaaaccaggtgggctcatgccagcgagtggggtggggtgaagtgttttgagttgggctattgaaacagggaaaaggttccactttcaacagggggctggaagcaaagcagatgctatctgcaccccagtgaaaactgtaccttatgggacaaaggcagagcaagattgttgggctggactctgcctctgagtgtcctgaaacttgcctcattgcaaggaaataaatctaagttagactttgtccaggaaggtgaggcaacccctaattttgtcaagattttgaggcagtactaaaggggtggtgaaacttggtgactcggaattaagacctattttctcatcttctttctcctggaaatttacctatagtgtttttatctgctaaactctttagagtggaatactttagacttgtattttataaatcttagttaccagagtccttaaaattttggatagatcttgtctaaactaaaatagtaaatccttggatcttaattaaacataaccattatagaaatcaagttgatgtgtcaatttttgaaaattcattctccagctctccagaaagaaggggagaatggatttgggggaacagccagcaggtggttacattggttttttctttataacaaagcctcagcagtttggcaaaaaaaatcggttcagtttctgatttttccttaaaataacctggacaatgtggtgactaagtcagatgtgagttggagacaaagcacctggcctgggagatgtaattacgaagcagatcagcttcctgagtccccttttgacgcttccccctagtgccccatagcctcattcctcacggtgcagctgttcagcatctgacctttccagtgacctccagaatggcttgcccttcctggaatccagtcctataactcgtaccgtcatgtggggaaagagggtcagtacataacaggccaattttgtgttgaaatctaattctgaagtgcacggattgtgttagggtcaaaccatttccactctctccgagtctcagtttcgcatcggtaaatggagataacacctagcttgcataaaggctgtgagttttaaatgggaaaaccatatctaatacatagtgggttctcagactttattattttctgctcacctctgcgattcccaagctgtcgaggatgttaagaggaccgagttcttgccaaggtccgtcagtcctcagcaatgcgtaaggctgttaacaattgtctgtggggccgccacacagagccagcaattctcaatggtgtatgttccagacatagggcgcaggtgtagagacagatccataggtcacagcttctctgtttaccaagagcagaacataggcctgagctctgaccctagtttcattgcttacaggcctgtgactctgggtatgttttctttcctctctcaattccactttcctcatctgtaatattttttttttgcataggtttattaagagaaatattattactccatgcaaagtacttagcacattgctgggtacagagaaatcactcacatatagttagccagaattatgaatgcagcctgtttgataacatctaggaagtgaaatcccacactcttaaaaaggtgaagaacagattgcaatgatcccagcacataaatagccttcagagtctgtcaaaaacacatcttggtcttagttcgttctggctgttgtaacaatagacatttatttctcacagttctggaggctagaagtccaagatcgaggtgccggcagattcgatgtctggtgagggcccaattcctggttcacagacggcaccttcttgccttcactgcatcctcacagggagaagggacgaaggagctctcaggggtctgttatacgggcactaagcccattcatggggtttcaccctcacgacctaatcacctcccagaggccccacctcctaatagcatccctttctttaagggtgaggattttgacataggaattttggggaccacacagatattcagcccattacaccatattgcattttagagagacgtaatccagtccattgcagcttctcttgcagaagtgctctagaagggtaagacagttttaagactgtttatctttatgcaaatctttgtttgcctttggatttttccaaacctgttacttatgataaaacacccataccagtaaggagaggctagactctcctacagtaaccagcagcctcatgtctcacctggctctgtgtcctcccaggcctgccccacagggctgtcacttggaggtgctgcacgtggttccaccctgtggggtaccagggagaggaaagaacagagcaaactggacaccagaaccagaaggcttcgctcagaagtgcacacattgccttcgtctcagtaaattagcagagcaagtcctgtaacccccgacagtgatgaaggctgatctgttccgtgctcagaaggcggagacctggaaatactgatgaaacacgaatgactgccccacagacacagagaaagatgagagattctggagcacactaatttcactttcagataacatgactctggcgttctataaatgcctgtgccatgtgagatgtcacaatggatgacagctttttattcccagaagaaaattcaaaataagactcatcattttatggtctaatttaaagtgatatttaggaatacctttttctaggaacacctttttctaggaactaataatcagataaagttgggtttgggactgtagacttggagcctgaagcaatactctttctataatgaaaatctgagtatagttgcttctaacagcaagtgaggatttcctacagagtgttgctgaggggctgataagaaaccttttcagaaagaacagcagattcctatagaccctattcccatggaagcatcagcaggaactccttttcttttggtgaaaactttcatgtcattggatgatctgttattagacgacactgcctgagttctatcttacgatggggaattggcgtttcttaagatcttcctttaaatatagcacagatccccagtatgcacattttcacagaggtggaagctttagaaacactcatgtagcagcagatgtctactgtgctctagcataagtggaatgaaatattccttaatatagagggacacacacaggcagaacctctagcgggtctgtgaataatgggaatgaaaagtggaagtcctatggccggcaaggtagattcctgggcttcagaggaggatatgaaatatttatagaaaacaaaatgaaatatgaacaacacatttatcatgttctccaggcatgataatatgtgatttgcagatgagacattcatttgaaaagcaagtacaccatgaaccctgggacgaggctgtacgttcctaaacatgcttggcttacggcctggctcagagcagggcttgccacatgtcatgtcactcacagccattgaggggcactgccatttgtgctgttgctgtgctttttggtctgtcttggaaacctggggaagtccccgttgttccagtggggcccttgataaacgtctcagtttcaggtcctcaagttgagacatcctttcagtcaacttgtggagtttctaattctgtgtcactgcctccagtagagcgcgttttgtggtggagagcgatgagagcctcagatcctcgggaagtgctccacgggtcccgggtctggctctcattgtgtgtgccagagccttgctgcccaaagtgtggccccaggccagggccttgctgtcacctggagctctcaggccctcccagggctactgtatcagaaccagtgaatccacatgaattcacattgcagtgcttcgtctgcacatgaaagcttgagaaacactagcctagagaacacctcagcatcctttctgaattagaagttatgctttctagggttctcattaagaaatgggcagttgcacagccaatcaatgaaaatggctttgcgttccctgaatcttcaacttctgagagaaggaggaatgtttttttttcttccactctggtccccaagaaccactacaggcgttccttacagaacagcaaatgacacagcgttcagccccaacaagtgacccgaagacgcgtccctcatctcatgcttgcctgtctaggcctcaccctttctcagttgaaatcagtcactgcagcagcgttcgaatggggtcactggagaaaacagccgcaacttcctggtcctccgtgggaatggctgaaagtggaagatggagagagaatcctgagaaaaaccctccataggtcagccccatgtcagccccagcatctatcaccggagggttctgaagcttgtggtgcactgaaggtgataattataaaagaaaaaatcaaatccagctccactcctgactagatgggcaaacacttcatcccctgcaccacacatgaagctttctttttttattattatactttaagttttagggtacatgtgcacaacgtgcaggtttgttacatatgtatacatgtgccatgttggtgtgctgcacccactaactcatcatttaacattaggtatgtctcctaatgctatccctccccactccccccaccccacaacaggctctggtgtgtgatgttccccttcctgtgtccatgtgttctcattgttcaattcccacctatgagtgagaacatgcagtgtttggttttttgtctttgcgatagtttgctgagaatgatggtttccaccttcatccatgtccctacaaaggacatgaactcatcattttttatgggtgcatagtattccatggtgtatatgtgccacattttcttaatccagtctatcactgttggacatttgggttggttccaagtctttgctattgtgaatagtgcggcaataaacatacgtgtgcatgtgtctttatagcagcatgatttataatcaatcctttgggtatatacccagtaatgggatggctgggtcaaatggtatttctagttctagatccctgaggaatctccacactgacttccacaatggttgaactagttgacagtcccaccaacagtgtaaaagtgttcctatttttccacatcctctccagcacctgttgtttcctgactttttaatgatcgccattctaactgatgtgagatggtatctcattgtggttttgatttgcatttctctgatggccagtgatgatgagcattttttcatgtgtcttttggctgcataaatgtcttcttttgagaagtgtctgttcatatccttcgcccacttgttgatggggttgtttgtatttttcttgtaaatttgtttgagttcattgtagattctggatattagccctttgtcagaggagtagcttgcaaaaattttctcccattctgtaggttgcctgttcactctgatggtagtttcttttgctgtgcagaagctctttagtttaattagatcccatttatcaattttgtcttttgttgccattgcttttggtgttttagacatgaagtctttgcccatgcctatgtcctgaatggtattgcctaggttttcttctagggtttttatggttttaggtctagcatttaagtctttaatccatcttgaattaatttttgtgtaaggtgtaaggatgggatccagtttcagctttctacatatggctagccagttttcccagcagcatttattaaatagggaatcctttacccatttcttgtttttgtcaggtttgtcaaagatcagatggttgtagatatgcggcattatttttgagagctctgttctgttccattggtctatatctctgttttggtaccagtaccatgctgttttggttactgtagccttgtagtatagtttgaagtcaggtagcatgatgcctccagctgcgttcttttggcttaggattgacttggcgatgcaggctcttttttggttccatatgaactttaaagtagttttttccaattctgtgaagaaagtcattggtagcttgatgggaatggcattgaatctataaattaccttgggcaatatggccattttcacgatattgattcttcctacccatgagcatggaatgttcttccatttgtttgtatcctcttttattttgttgagcagcggtttgtagttctccttgaagaggtccttcacgtgccttgtaagttggattcctaggtattttattctctttgaagcaattgtgaatgggagttcactcatgatttggctctctgtttgtctgttattggtgtataagaatgcttgtgatttttgcacattgattttgtaacctgagactctgctgaagttgcttatcagcttaaggagattttgggctgagacgatggggttttctagatatacaatcatgtcatctgcaaacagggacaatttgacttccttttttcctaagtgaataccctttatttccttctcctgcctaattgccctggccagaacttccaacactatgttgaataggagtggtgagagaggtcatccctgtcttgtgccagttttcaaagggaatgcttccagtttttgcccattcagtatgatattggctgtgggtttgtcatagatagctcttattattttgagatacgtcccatcaatacctaatttgttgagagtttttagcatgaagggctgttgaattttgtcggaaaccttttctgcatctattgagaaatcatgtggtttttgtcgttggttctatttatatgatggattacgtttattgattttcgtatgctgagccagccttgcatcccagggatgaagcccacttgatcattgtggataagctttttgatgtgctgttggatttggtttgccagaattttattgaggatttttgcatcgatgttcgtcagggatattggtctaaacttctctttttttattgtgtctctgctgggctttggtatcaggatgatggtggcctcataaaattagttagggaggaatccctctttttctattgattggaatagtttcagaaggaatggtaccagctcctccttatacctctggtagaattcggctgtgaatccatctggtccttgactttttttgattggtaagctattaattattgcctcaatttcagagcctgttattgatctattcagagattcaacttcttcctggtttagtcttgggagggtgtatgtgtcaaggaatttatccatttcttccagattttctagtttatttgcgtagaggtgtttatagtattctctgatggtagtttgtatttctatgggattggtggcgatatcccctttatcatttttttattgcgtctatttgattcttctctcttttcttccttattagtcttgctagcagtctatcaattttgttgatctcttcaaaaaaccagctcctggattccttgatttttttttaagggtttttttgtgtctctatttccttcagttctgctgtgatcttagttatttcttgccgtctgctagcttttgaatgtgtttgctcttgcttctctagttcttttaattgtgatgttagggtgtcaattttagatctttcctgctttctcttgtgggcatttagtgctataaatttccctctacacactgctttaaatgtgtcccagagattctggtatgttatgtctttgttctcattggtttcaaagaacatctttatttctgccttcatttcgttatgtacccagtagtcattcaggagcaggttgttcagtttccatgtagtcgagcagttttgagtgagtttcttaatcctgagttctagtttgattgcactgtggtctgagagacagtttgttataatttctgttcttttacattcgctgaggagtgctttacttccaactatgtggtcaattttggaataggtgtggtgtggtgctgagaagaatgtatattctgttgatttggggtggagagttctgtagatgtctattaggtccgcttggtgcagagctgagttcatttcctggatatcctttttaactttctgtctcattgatctgtctaatgttgacagtagggtgttaaaatctcccattattgtgtgggagtctaagtctctttgtaggtctctaaggacttgctttatgaatctgtgtgctcttgtattgggtgcatatgtatttaggatagttagctcttcttgttgaattgatccctttaccattatgtaatggccttctttgtctcttttgatctttgttggtttaaagtctgttttatcagagactaggattgcaacccctgcctttttttgttttccatttgcttggtagatcttcctccatccctttattttgagcctatgtgtgtctctgcacatgagatgggtttcctgaatacagcacactgatgggtcttgactctttatccaatttgccagtctgtgtcttttaattggagcatttagcccatttacatttaaggttaatattgttatgtgtgaatttgatcctgtcattatgatgttagctggttattttgctcgttagttgatgcagtttcttcctagcatcgatggtctttacaatttggcatgtttttgcagtggctggtaccggttgttcctttccatgtttagtgcttccttcaggagctcttgtaaggcaggcctggtggtgacaaaatctctcagcatttgcttgtctgtaaaggattttatttctccttcacttatgaagcttagtgtggctggatatgaaattctaggttgaaaattcttttctttaagaatgttgaatattggcccccactctcctctggcttgtagagtttctgccaagagatccgctgttagtctgatgggcttccctttgtgggtaacccaacctttctctctggctgcccttaacattttttccttcatttcaactttggtgaatctgacaattacgtgtcttggagttgctcttctcgaggagtatcttggtggtgttctctgtatttcctgaacttgaatgttggcctgccttgctagattggggaagttctcctggataatatcctgcaagtgttttccaacttggttctattctccccgtcactttcaggtacaccaatcagacgtagattaggtcttttcacgtagtcccatatttcttggaggctttgttcatttctttttattcttttttctctaaacttcctttctcacttcatttcattcatttgatcttccatcactgataccctttcttccagttgatggaattggctactgaggcttgtgcatttgtcacgtagttctcatgctgtggttttcagctccatcgggtcctttaaggatttctctgcactggttattctagttagccattcgtctaatcttttttcaaggtttttaacttctttgccatgggttcgaacttcctcctttagcttggagtagtttgattgtctgaagtctccttctctcaactcatcaaagtcattctccgtccagctttgttccgttgctggtgaggagctgcattcctttggaggaggagaggcattctgatttttagaattttcagtttttctgctctgttttttccccatctttgtggttttatctacctttggtctttgatgatggtgacgtacagatggggttttggtgtggatgttctgtttgttagttttccttctaacagtcaggaccctcagctacaggtctgttggagtttgccagaggtctactccagaccctgtttgcctgggtatcagcagcagaggctgcagaacagcggatattggtgaacagcaaatgttgctgcctgatcattcctctggaagttttgtctcagaggagtacctggccgtgtgagatgtcagtctgcccctactggggggtacctcccagtcaggctacttggggggtcagggacacacttgaggaagcagtctgtccgttctcagatctccagctgcatgctgggagaaccactactctcttcaaagctgtcagacagggacattcaagtctgcagaggtttctgctgccttttgtttggctatgccctgcccctagaggtggagtctatagaggcaggcaggcctccttgagctgcggtgggctccacccagttcgagcttccaggccactttgtttacctactcaagccttggcaatggcgggcacccctcccccagcctcgctgccaacttgcagtttgatctcagactgctgtgctagcaatgagtgaggctccgtgggcatgggattctctgagccaggcacaggatataatctcctggtgtgccgtttgctaagactgtcggaaaagtgcagtattagggtgggagtgacccgattttccaggtgccgtctgtcacccctttccttggctaggagagagaattccctgaccccttgtgcttcccgggtgaggcgatgcctcaccctgacatgaaactattttttaagggcataaacagtgtctacttttacacatgatttccagcagtaaatcaaaaaatgacagttaagaaaacaaaataaaacaaaaacaaaaacaactcatagtcaacttataaagcaatcaatcaatagaaccagaattcaagatggcccagatgtgggaactctaagacaggggctttaaaataactctgatgaggctgtgcatggtggctcacacttgtaatctcagcactttgggaggtcaaagtgggcagatcacctaaggtcaggagctcgagaccagtctggccaacatggtgaaaccccatctctactaaaaagacaaaaattagccaggcgtggtgctgggtgcctatagtcccagctactagggaggttgaggcaggagaattgcttgaacccagaaggcagaggttgcagtgagccaagattgcaccattgcactccagcctgagcgacaagaacaaaaactccatctcaaaacaaaacaaaaacaaaaacaaaacaatacaaaaaagccctgaagaatttgttaaatgatctagaggaaaaggcatatggcatacatgaacagatgggaaatttcagcagagagatagagagtataaaagacatgtgggaatgctacaaaaaatatataagacataaagaattccttcagaaagcttatcagtgaactagtctcagctgaagaaagattaaggaacttgaagataggtcaacaggaatcatataaaatgacacacaaataacataaaatgggctgggcacagtggcttatgcctgtaatcccagcacttcaggaggccaagacaggtggatcacaaggtcaggagttcaagacccgcctggacaacacagtgaaaccccatctctactaaaaatacaaaaattagcctggtgtgggggcatatgcctgcagtcccagctactcgggaggctgaggcaggagaattgcttgaacccaggaagcggaggttgcagtgagccaagattacaccactacactctagccttggcgacagagtgacactcttgtctcagaaaaaaaaaaaaaaaaaaaacaacaaaaaaaaaaacataaaatagagggaaaaactctgtctaacaaggcctccaagagctgtgagatcatctaatgtacatgcagttggagtcccagaacaagcaaacaaacagcaaggaataaaacagaagaaatatttaaagagataatttgcaaatataatgcaagacagcaaacctcaggtccaagaagctcagggaatcccaacagtataaatacaaaaacaaataaaaaatctccataccaaaaaaaaaaaaaaccccacctagacacataaaatcaaactttttaaaaccaaagataaggagaaaatgtagaatgcatttgggagttgtgggggacattacatacccaagaagaaagataattgtaatagatttcttgtcagacatgtaagctggatgttaatgaactgacatcttaaagtactgaaacaattaatccagaattctattattctattacagatccattaaaatattgttttaaattaaaggcaaaaataaaagctttttagaccctgaaaaactaagataactcactgctgagagacttgtgctacaataaatgttaaaggtagttctttaggctataggaaaattataccagataaaaatttggggttacacagagaagtgagcaccagaaatagtaaaagtggatattaaaaacattttctcatggctgattctttaaaagactgtcaactatggtggccaggtgcagtggctcatgcctgtaatcccagcactttgggagcctgagatgggcagatggcttgggtttaggagtttgagacaagtctgggcaacatggtgaaaccctgtctctacaaataatacaaaaattagctgggcatggtggtgtatgcctgtagtcccagctactcaggaggctgaggcaaggaggttgagcccaggagggtgaggttgcagtcaggcatgactgcaccactgcactccagcctgagcaacagagtgagaccctgtctcaaaaaaaaaaaaaaaattgttaactaaattaaaaatagtaaacagggtttatgacagatgtagaaataagatacatgaaatcatttgcacaaagtggaggaaggagttggaactatctaatgtcataaatgcaaactactaaggaatgataatattctgaaattgtcagttttttttaggcaaagtaataatttcagatcagttgctagtatcaatgaactatcaatgtttgaaatgttttcagtataagtagttcaagggtcagtatgaaacttaaatttcgagggaaaaaaactaacatcatttaattctgtggttttcagatttagctaatatcagaatcacctggaagagtttgttaagcaaagtttctgagctttctgggcactatccctgaaaagtctgatgtcacacatctcctggaggtaacgcctctctgtttaacaagcagcctctgcagccaacaggttttgcttctctggggaggaagttgacctcagctgcagtgaccttcctggagaattaaacagaggggtgcagatccttacacatggccctctaccaggatgacgacctccctctagaacaggagatactagttttactggttaatggcagagccgagtcaggggaggccagaaccaggcagaagtaacttgagttttcagctctggagagactgcagccttggtcaaagccaagaaaatccccgtccttgcgttattgaagtggtcagtgtgaagaaacaagaactccccagacactggatctctttgattgatctaaagacctttcactccaggcacatggggcccatgaaaactgtgggcccagcagcatatcacaccagcctcttggtgtggtgctctctgtggttcagaataggagcctctcgggtcactgtaggaccccaccggcccctttcctccagacataggccacagatcagcaatgtattttaagcgaccccgttggcgttgggccatgtgtgtggcatctctgtggcagcaggtggccacatgctcctgagtctcagactggaggtgaatagggcagcagaagaagtcaccagtgttgagccaagtcacaaagaatagggccagtggcaagggtgatgaatgggtcaaggggattgtagtcaaggagctgtgggccagggctgggctccatgcaggattgtgcctgggggaccatcgtgggaaatggcttcctttgagctcctcaaatggaagcaagagtcagcctggttttcttccctccagggagcaacacagaaaggattttctttcttccacacaagaggaagtttttaggctctgccaagtaaccaaagtaatagaaactgtgatgtctccagaactagcctccaacttcctccaggtggcaggaaggggagcagccacctcgcctctgtggctgctttgtttttcccttcttttcttgttcctccatagcctacttcctccattttggggttcctgtatgtaaagtactcattgacccagagattgtatctcaaaaccttgtacccaaaggagcaattttcctgtgaacgttcccaagacagcgttcccaaaaggtgttaccagcctcaagtcagcaatcatagtgtggaacggcggtttagttgttgagtggaatctcttagcaatcttccgacaagctggatcaatcaagtgaagctagatttctattgttgattttgttgtttgtatgttctcatgacttaggcatgacctatgtgcctctcctcctccagctctccaattttcgccatccactgtgtgtcagactcaggcctttgaggtgcctgcatctctatataccacacatgaggcaggtagggctcagaaagattaacaactttacacacatcaccccattaggaagtagtagggtcaagagtcgagattcaaatgctgatataattcccaagtctgtgctcttaaccagcaatatcatcttcaagttcagcaaagagtgttttgtgtttctctatccaaatgatgcccatctactctgtaccatctatgagcgtacaccatctatactctcatatcctcacgtgcccatttttcctgtaattccacttcttaggcttgttccctttaatactataaccaagcgagggaatttccactttaaaagggaatttgaaagagtagagtctcatgtgacttccattcatttccctgacctgtagttgtccaagggacagagggcgtctttgcatgttcagtcagtctaaacagctttatttggcaagatgtttaccagtttccatggtctttggcaagatgtaaacatgggcagagggtcccgagtaagaagaagttggaaaggaagttgcctggccaccgatgaggcttcgcgtaactgttccacataaaggtcgtctactgttttttttttctctttcaagttaaacctcttcccctttttagatgacaagtcacaaagctgatctaccccagattgtggcaacctcaccctatctatacatcagctaaaggctgatcgaagatcaggtctaaagattgttgcaaaaaatgagataagcttttaaaaaaccccagattctttaattttgtatgtcagtcatcaagtcttcattcacacgctcactcagcaactctttcttgagcgcctgctgtctgcgctagaccctgggtaggcaggaatgcaggctaagcgccttctctatggggccttacatccaagcgacaacgtgccaggaggggaccagtgcccaggagaaaaggaagcagcatcagagccaggaagggagttgggatcgggaagctcttttaagctgggtagtcagggaagcttgaactgagacacccaaggggccgacagtgtggttgtctggagagcaacctgggagagaagcagcaaggaccagggccctagagcagggaccggctggacagatcccagacacagtgtgattgccggggcaactggcataaacaacagagctgggaaggacacagggcagcgggaggagagcagggcaagggcgagggctccacggggcctctaagtcatgggaggacacagggcattatcctggcgcatgtggggtgccctggggagctcagaacagaatccagacatgatttgaatcatgctaaagctttgccttctctggagggcaaaagtttggggcaggaaggagtgggaatgactggctatgaatgtgggatatacactattaatacatcctggagatggccaggaacatttgctgattttgctgacgtatttgatgtggagaaagaatccaagcacgactgcaaggtttggggcctgagcagttggaaggactgactgttgctttgatgatagcacatgtcggaggaacaggtctggggagtgaaattgagtttggcttcagatctgagactcttctgaatactctgagtgggggtcggcgtctggagttccacaggaggctctaggctgaagacagcgtgtaggagtggagtcggttaatatgattattaactggatagtgtcttcccaaaattcatgttcacgcagaatattatttggaatattattttatattatttggaaatagagcctttgcagttgcaattagttatgggactcaaagtgaaattatcttgcattcagggcaggccttatgaaaacaggagagaacgcagagacggagggtttgtgaagacggaggcatagattggagtgatgcattcacaagtcaaggggcaccaggaactgcagaccccaccggaaatgggaagcgaggctggggacggttccctgcacagcctccaaatggagccacccctgacagcacctcgatttcggacctctggcccccgaagagtgaggaagtaggtttccgttgttttaaaccacattgtttgtggtactttgctgaggaaacggactcagggctcagcctgtaaagggtgtttacagcatgggtctgaatgatgccctccagaacctgtgccagtgtgtgttgatgttggggggaggtggccaggcagaggagcttcgtgaatcttcttactaaccagtgaaaagcaacaaggaagaaacagacggtgcgttccaaagtaattctggccagtgctgcctctgcagctctctgggtaaaagctccgtaaagactgaaaatcagggaacctcactcctaccctggtgcccagtactgaagctcggtgcccagtactgaagctcggtgcccagtactgaagctcggtgcccagtactgaaaatcatccttacaatatcagcattggcttggaggggtgttacatatttttaaatatcagctttattgggataacttacatacagcaaaatgcatccattctcagggtccacttcagtgagttttgacaacgactgtgttccagtgtaactgcaaccccaatcaagatctagaactttctactcccaccagcttccctgagctcccttcctgtcaatccctccccgtctctccctgctccaggcaactgctcacctgttttctgtgactaaatagaagaggcttcccctagggttttgcatacttggaaccctacggaaggcactgtctgtgcctgcgtcttcgccccggcgagctgtttccagaatcctctgggcggtggcctcgcctcctgggctgcgctgcgatcagctggggcaggctgtgcttctcttaccaaccctgcttcggtgacaccgggttgtttgcctgacattggccgtggtgtgagtgttgacctcacagaaacgggcccgggctaccagccggggctgcgttctcccagagcactggaggatacacatctgccggtcacacgctggccatgtcttttcacattcagaataatttcctgatcactcttctgcccatatgagcaaaagtccagtctccatgattgccctgccccggcctgctcatagctcaccctcccgtgttcccaggaatcccaggagcccgcctcgagggccgtatcctgcttccagaggcatcgtggacagagaaaggaagcccgaggcccatccctggcttgactgcgtgggacgcgttctccgctgcccttgcttccctcacgtggagcggagagcaggcgctgagaaggggccctgcgtggtgacccactagggttagttcagagccttgtgcacacagacccgagggggttttcaaaggaagctgacacccccgcgagctgagggcggctgttctcacgcatgctcagtggcgctccctgagtgctgagagccacggtcggtgagagaggagcttcctgatgagcctcagacggtgctgaaaccagccgactctgcccaggatcctgagtcctggtttcctgttgacccttccttccctcacgacttatttcccctgggaactatcgatgttcttttggccagtgggcttccgttgaggccatcctaatcatcagagaggttttagtcgagttaaacctcaaaagagaaggtgtttcttaattttcccaggggtgcccttggccctgatacagatttagctaccttcccccgaaagcctcaaagttctgcaaactcacagccaagcaaaacgcagctgcagtcgagccagcctcgaaaggtcttacaactttctgcagtggccagcttgttctctgtttccatgccttccagaatgaagaagatcagttctaaggtttcttactatttctaccaagagacgaccatcggcattccacagacggctcctctagctgtgcacaatgcctgttcttatcgttatcacccgcttcgcgccagcggttctcaatacaaattccttgaggtttcacagtcacagataggttgtatttgtagggaaacagaagtgcttcagtggaatactattgctctttgtacagaaacctgacacctagtacttctgaattctaatcctagttctgttaacaattggctttgtagcagcctagataaagtcaaattatttctctgtgtaaaagaaaaacctaaccagtagcaggggcacagtagtctatgtgccttccctctgggcttgtggttagtcagcaatgggggctttgtgaactgcgtagaccagcaccccacagtctgtttcagttccagtttatcccattgtctcacgtgatcttgagtcatttaatcattctgtgctttttcagccttcagtgtaacaaaataatttactaagcacctagcaacttggggtttgcttgaggttgttatatctgattagatatatctctattagatattagatgtgtctgtacatgtaaagtatgatacattatatccccacaagccaaacaggcacacgtaaggccagcttatagcattgagatttggaagaccccttagaaggtagatcagtgaccaacaactgggcaagaaattcccttgacaatgcagctgcttgagtagtttcagtttcagagctctcctgtggcaagtgaattattggatagtagtgacttattcatgtgttagaaagtccttctttggatgagctggtatctacggaaacttcccttattctacttttgtctctgcacctagcatagttcctggtacagtatataatgagccctcagaaaatattaggggaactgagaacaagactgttttcttccacacagtagctctttaaaatttgaaggtagctctcatgttgccccctaattttctcattttgggactaaacacactcacttgctataattctttatagaggggtgtggcccccgatgtgtggctgtggaaaggcatggtccccaatgtgtgaccgttcaggttgcgtttctgaacgcaactcacatcacttctaagatagggtgtccaggtctggaagaaatgatccatttctctactgatgagcatagcaatctgtgggcctgttgctgtccacgtctggaataccagctaaggtggattgatggtgccgatggcccccatgcataggttcctggcactcccatcctctgggatgtggtccacagctcctcccattgcaggtggagggtctgcttccccacccaagtctgccttggcctgagacttgctttgaccagtggaatgtgagcaaagtgaggctgtgccagttccagtctgtgccaccaggtccctgctggaaaccagcttccatcatgacagcaggctggggctggcctgcatgagggtgacagagcacaagaggtacaagagttgttcctgtcaaggccattctggaccagcctgcactggctgaccgattgaccagacagggagtgtgctgggccaggtcatagtggccctaggaccaccctggagacttgggggcaatgttgaatggttatcactgtgtgtcactgaggttttagggttgtttctcgggcagtgttgttttggcaatagataattcatacaccctactactagcactgcccaagactggattatctgtgacagggacttatatcagacttgtgacctatgaccttcgtctgatcacttttatgtataccaatttccctacctgtgccatccaacatggtagccaccagtcatgtgtgactacagagtgcttgaagcatgttagtctgaagtgagatgtgctataaatataaactacacacctgattttgaagactttctacaaaaatctaaacgatctcactgacaatttttattgattacatgttgaatgtattatattttagatatatcaagttaaaataaaaatatttggaaaattaataatttcagtttgctttgttttgtttgtttgtttgtttgttttgagatggagtcttgctctgttgcccaggatggagtgcggaggctgcaacctccatctcccgagttcaagagattctcctgcttcagcctcccaaatagctgggattacaggcatgcgccaccacacccggctaattttgtatttttagtagagatggggtttctccatgttggccaggctggtctcaaactcctgacctcaggtgatccacctgccttggcctcccaaactgctgggattacatgtgtgaaccactgcgcccggcctcggtttgcttttttgaatgtggctgctaaaaaattaaaatgacatacgtggctcacgttacatccctgctggacagcagcgtcccagacagagccctggaaacctacatgtttctaatttccttatcttcatattttattgttttcagctcagaattccaaccacatgagataatatggaaccttgagcactatctgtagcatctgttgtccatcacagatcttagaattcagcaggtttgataatcatctttcccttttgcatgcaactcattgatttaaaataattctgaccagcacaaggccaatggcacgatcatgtagcatttcattaatcaattcttttcacaccaaaaatatcacttcccattcctggtggtacaaagtgactcaatcagcaaggaatctacctaagcagcagggtcattcggcctacatttgccattttatctcaggggattttatttatttattttctgctttttttgagacagagtttcactcttgtcactcgggctggagtgcaatggtgcgatcttggctcactgcaacctccgcctcctgggttcaaacgattctcctgcctcagtctcccgagaagctgggattacaggtggctgccactgcacctggctaatttttgtatttttagtagagagggggttttgccatggtggccaggctggtcttgaactcctgacctcaggtgatctgcccacctcgacctcccaaagtactgggattacaggcatgagccatcgcgcccggcctctcaggagattttaaaggaatctgcgagatgctttgctgaagtccagatctgcgggaggtggagctgcccgagcccagcgctcaaggcccagccagaaccgaaccaaggctggctggggccgatgcacgcgaagtgcttgtcccgtttacttctaaatgcccacagggtgttcattagacagcgtggcctgaagtgtttcctgatgtcgagtcatggccgcctgggtttcttcacagctttccttttggagctcagggcggctgtcgtcttgggctccaagggtgcctttccgccttctcgggtccttccgggtgctggagccggcgctccgacacagggagatgtcttcatcaaggggattccacagagccactcccagcctaataccagatataaaaagctacgttcatggatgcaagctcagttttctacttaaaaagtgaagagattccgcttgcaagtttgattcagttcaataccttccctgatacctcctgttttacttttctcatatataattcttccgcctatacacaggaaatgcaacaatttttttccaccaagcctcttctaggtgcccagaccacccccgctaaccccagtgtgccctgcacaaacgtggggtcctgtggatgcccggaggtcataatcggggagccctgctctctctcccgcacctggttccctggcctcaggctgagtcacacagtccctcaggcctggagtgctctctgactctcacctgtgtggcaaacgcctctgcatccttcagcgctccaccctggaccttactcctgctgcgctgctcctcaaggcccgggaaagcttcccaggaccgatctgggtgtggatgtgtggggcacgttattctaacaatttgaagtaagtttcttatgatggaagtgcccctgtccccaggtcaaagtacctgctttctaaagcccaagtctaacatccttattccagtctccaggcacgaacctcgccgagacacctccacactgctccccatacctccctgcagttttcctccctgggttcctccatggacacgcttcactctgcagggaacctcctagctcccctccctgctgccccatgtcaggcacccttggggataaaaagcatctgctgtgggtgcatgaagagcatctgctgtgggtgcatctcctggcacgtctgtcttccgtagctcctcttagaactccagccatgggtgtcgattctgttcaacccacagtcctcacatcctgggaacccccttgtggttgcattatctttaatcttttgtgattatgtcagtcaacactgagttgccttttacacaatgggagcaagaggaagaaggaggaagaggaggaggccaagctgcagggaagaaggatatggagaggagggggcagcagttactcccacccttggttgatgacaaccaacacgtttagggcttgttgagttaaaaccacaatcccccaggaggtgaatagagaaacttgcgagaaaaagagagacaaaggcatttgtgaacaggaaaagcaggctttgttttcaggctgcttggagaaagtacttaagtaatgacttttactgggaataactagaataactggtcatggataaaagtcccttctcttgcttttatgtgtccaagaaagtatcccagaaaccaaaggtcatggtcccaggaggcatctcaattctagggaataaatgctgaatgggagtctggactgggggaagatttaagtatccaagtccaacgggacgagtggaaactgagcaccacctgataggaccaatggcgagagctcagcgccacttctgtgcgatttctgtcagaaatgttggtcccgtgtctggtcataaggaaacacgaaacaaacccaaattgaggaacatcatatacgctgccattgtcccacatcccaaggttatggttcccgggaaagaggaaacggacttattttgaaggggactaaagagaatctgagaaacaaacacaacgtgtgattctagattgaatgcttttgctagggaggatgttaatggggcctgaatctctgcctgcatctctgattagatggtggatgtgtgttgtgggctgcgcaaggttggagataaccaggtctactcacgtttgcgtcattttacaatgtcacacttttactgatggtattttactcataaagccatatgctacatggagttcccaagcaggcaattcttagtgcttccattcactcagttgtcagggccaccggcacacaggctcaagccacaagccattcaatactgcgaactgtacatcagagtatacttaaccaatacatagatgttatagattaaacactctacaataaacaaagtgacatttaacgtcaagagaaagaggataggaaaaagggctaacaggccagtccaggtagagtgatgtggacaaaaagaatgtcctggcctggcccgggcggtcgtcagcatcagcgtcatgcaagaaggaatctttgatgtgggcagagcctttggtgacagatgctgggtgcttatcatgagtgatggcaagatggtgtctgttgaaatggccatttccagctagtgaagcactgctctctttatgttctttatggccacagagtcctctggtgaagactgatagtggaagagtgtgcctgggaatgtccttatctggtgcagtctttattgatgaggcaaacttctggttcctgtgatgaggtgccttttgaagtataagatggagtgtttttctaagatggagttacttacgtcaagggtgcgctatgcaattcgtcagggctgttgtgctggtatcaattcttcttgcctcagcaaatcgatgaatcctcgccattattgttctgcggcaggcaggcctatgcaaacctacccccaaagtcccaggaagccgagaggtcaaagaaagaggctgacaaatttggtttctgaggaagagacatttaatagggacttacaaacagaacccatggtcttgggcagccaggaaacaagatggtggccccctgggctatgacccccaggtccagggcttctacagcatagggaaggaatgtgtaggacaattgaagtagatccccagggaaaggcaagagtgctatgtgaacctgcccaaaggcaggggttattgtcaaagttgtgttgacctaagggcaggatttatggcaagcataagatcttacccagggaacagtaaataaaatagaaatcttagaggccttcctggaacaggggttaattagaagtcaacatggaagattagcgtccaagctggagctgcttcagcctccccaaccgcgctcttcggatagtaaaaggcaaactggccaccaatagcttcttttatattttctgcctactttaaacgtagagttgtaaaacataataatgataggaaaaaatttttaaagtcactaaaagagaaacacagaaagttaggtttgccagaaagtactttgttttgaagagttttgaatattttccgtaagaaaaggacagaactatgttcattgaaatatgtttggtgattgaactgtgcaccaatggaatcagtattttatttttatcatcatctgtctctttagcatcagatatttggggccagattcccttttcattgatttttaattattaacttttcattttatttgaccatttgttctttgtggagcaccaacatacagaaacaggcaaaaaccactgaaaaattggctctgagctctgagtggcccctgtctgaatgtcttcatgcgacagatgcttagaaatttaatcccaagaaataataggattatatttgggaatgacagtgaccatgtccagcttagtcagagtttaagtaaggcttcactttggcactcttcctcaggagagttggaggcagggatggatgaaagactgaaccttttcattctaataattaagactttgcttttgattaataagaatgtcaatccaaagcataataatagataccagcaggtaatatttctaaataatcagatttaaatatgcattaaaggaagtaattaccatgatgattaccatgactaaggttgattgttcatgttcacactgaatctccagattcctccatgtggcgcattctcaagtctttacagtgccagtgtcagtgatgatgggcagctcttatttaaaaataattgagttccatagcacggttccatttggctatagtagggaagaattggacccattttattccttcagaataaatgaatgttggtactaatactgttttctgcagcaaacatgaagaaagtttatttccaagtggctgttttgctcactctgccagcatcccaccggcatctttataatgtgtatttcagtaagccaaaacaaaaggcttacctgtaaaatatgtgtgtgtgtattgaaaaaaatgtacatattagaacaataaaagcagatgttgatcccaggatggaacaggcagtgtttacaagtttcctaagttctgccttagtttggggtttgctggcagcagcccctgcatttgagtgtgggtgtgttacctgggaggcatcaccagggtcctggaaagtgacggtgagggtgggaaaggagggtccctgatgaaaggggcatggcccagcaacgctcccggggggatacctgggcttgactccccatggggattctggccaagccagggtagaacatgtaccataaactttccccacccaaagggagggagtggggttatttatacaccaaaggcccatcagatattaagtgggggctgctcctttgtgaggcattcgttctccagcacttccaggccagcaggccctggttccccactcagtccatcagcattccatcctgctctttttgtccaatcccctctctacacagctgtccatactttgttgaacctaagcatagacatagacaacttccccagtacccttgggttttcattctggaggctcctgtgtatacacattaaatacatttatctttcctcctgttaatcaatcggcctcatgccagagatttctcagtgaagctttaggggccatgaagttgagactggtgacctgatgggagagcgaaggcagcactctgtcgtcatccacatcactgcatatctcagcaccacattcacatcttctgccaacactgacatgaagatcagcgctgagggggacaaggagtcacaaatgagcagtgtttcccctagagggttggaggtggtgggaggagagggttccagggtgggggctgcagccatctgtgcagggggtgcagtaccttgctctctggactcggtgatattagggtggccttggagtaggtgagtgggtgctgctatccacgtatgtcaggaagaggacctgagcgtgtttactttttgtcataataagttgctgaaacaactgcccctccttctcagtcctttagtccatccctaagggaaggagtgagggccccccaccatttgccaaacaggagctttgcttggacactcagggccggtgcacctgcactctgactcccaacaaggaagtgtggggtatctgtaagtttctgtggttgcagatgagtttctgtttcccttgccctcagccagcctctcgggaggtcaaggttctttactaggtggagagccaaactttcattctccggttctctgagtcctgtctgtgtgagtgctgtgggctgaatgtgttccccaaaattcatatgttgaagccctcacccccaaggcttgatggtattagaaagtgggaagtgcaggaggtgattaggtcatgggggcagagcctcatgaatgggattggggccttaataaaggaggctcaagagagtcggctcatcccttccaccatgtgcggacacagggagaaggtgctatctataaaccaggaagtggccctcaccagacacccaatctgcagcaccttgatctcagacttccaggcccagaaccgtgaaggctgaacttctgctgttcataaagccacatggtcaaaggtactttgttatagcagtctgaacagacgaatgccgtaacagtgtaccccagattgggcagcttaagcaacagacatttattgtctcagttttgaaggccaggcctctgaggtccagatgtcagcagggctggttcctgctgaggccacgaggcaaggatctgttctaggcccctctcttaggcttgcaccttgctgacttccccaaatgtgcgtttgtgtatctgtatccaaattttcttctctttcaaggacaccagtcatattggatattaggactacactcaatttctttcaaggacaccagtcatattggatattaggactacactcaatttctttcaaggacaccagtcatattggatattaggactacactcaatttctttcaaggacaccagtcatattggatattaggactacactcatgacctcattttaacctgatcatctgcaaagaccctatttccaagtaaggacacatgcacagatactgggggtcaggaccttgacatcttttgggcggggggcacattcagcctataataattctgttctaatcatcctctaatcatcttccattcaccttttccattgcacatggcggtgcctccagggatcttccccaccaaaacgtctgtctacttatattgcttctggctccactttgtagagaaaccctattttctccatggcagccaagggcaagtccctcagcctgcaaagtgaccctccatggggcctttgcagagcagcatgggcagcctcagtgggcaccacagtggcagcctcagctccagacttgttggaagcacgatggtgttccaggtggaaggactctgccttgggaactaaagtcttggagaccccagagattcaggaatgggatgcagcaattttgaggatgttttagcagatgtaatttcatgaagaattaccctcttttggttcctggaaccatgaattctagccatggatattgacttggaacatttgtgtgtgattcagagagcatcgtaacatttcaatgtgctgtgccccagttatcctataaagaagtcttccatagttgattccagcattctttaatgccaatcacttgggcttgatgaggacgggataagcctgctggctgtcaccacatggctttgcccctttcacggggagctggatttctcggaagctacattcagtgggatatcatcacggtcatcacggcattcagggactctgctgagatgagcagaggcacaacaggcaggaaaagcaaatctgaactcagaatcatggtctattgtagtgagagcagagatctgcccttccatgctggaagaagcccatgtggtcggcctgactccaggcagctgtctggtgtttcccacgttgcagtaccacagcaggggctcaggtttggcaagctgagcaaaggtgttagtcaatcttggtgaagggaagcccaatcataactgaatcccctgccttgcccgctggcatggctagcaataggggccagctggcacggtcggagcagagcctgctgttccagtgattccgtagtgggcctctcctggagggcattgcatgggatgatttttttgtgttggacccatttgaagagcagcagtccatccacacacacccttctccaacctccctgacactcgttccccatcctgagcatctctctggtgaagccactgaccctgagcaggtatgaactgaggttctcacaggaggccctggcaggccaaccatcatgtgtgctcatctttcctgaggtgatctttctcctctattgtgccttagaatggtctgaactgggctgtgtgtccacttccagctcgggccagcacagtgcactgtgaactctatgaggccaagtcttctcatcctcatcaatttgcacagaaaatgcccatggagccatgggcttgggttgagatagagctaaacatgctggaaatgtgagcaaactgtgtatgcaaccgatgcttccaggcctgctcaggtccaggcctgagtgtgctacttaattgatgatgaagtggggttaagtgtgcccaactgtaagaccacatgggtcatgtaataccttgggcatgctgtgcatgatcagcaactcaggctcactcatgtttggtcttcagtggacaggccataaataccaacaagagcttgacccccagatccagggacctgctctgtgatttcccaatcggggcctccttagtctccttttgatgtttcccccttgtgccccatagcctcatgctagggatcctgatccacagaagccacttggggctcacagcacctctggtcatcagagcctgggagcagggttatctagcctgggccactctgggaattctcatcttgtcctcagacccactgaaagctggcatcttttcaagtcatccagtaaatggtttgaataagataatcaaatacgttgcttaaaaatccaaagaagggctgggtgcagtggcttacacctaacatcccagaagtatcacttgagctcaggagttcaagaccaacctggacaacatggtgagaccctgtctctaaaaaaaatttaaaaatttaaaaaaatccaaagaagccttgacagagttcagccttcttaattgtaaggaatttcaattctagatgcttggatctgtgggaacaactccaagaacacaggcccctttgaggctagaggatttatttcccaccctctgacccatgtgtgtcttttcaaaacaacacaactttctaatcctgttttctcagcaatgaaagcttcactgtagtgcccagtgtgacgtctgagaggctgccccctgactagcactcttcctttccatggacacagatgactaaattaccccagttggtaaaaaggccagtgagccagtataaggagaagagctgaacacctccctccaacttcacacttactgggagagcttcagaagctctcactgggatgtgaagcatggaaagacacatttctagagaaacgaggtctcatgcattagtgtggagcttggagcttggggatatctgatacctggtgtttgctgcttgcatgctgctattccccagtttctagcatcgctcttggcccctaagccacacttctctttccacttggggtgcctgattatgaaattcactcctctaaagcccctctagcgtatgtctaaatcatgcaatagacttttacttaatgtgtggggatggtggagggctggctatgttgtagcaaaggccaggacaacctgaaactaaatatgagaaatttctacctctaaattcctgttattatattatgccagtaatatctccccaactccagcctagattgacctgtgggcctacattagcagattcaaaagcatccattagcagataatccttatcaataaggaacagataagcccacaattacttcccttatttattgtaccacccaaggatacccaagaaacttattagttcttgcttaccattttcacttttccgcaaatatagtactcagtaaagaggcagagactggcagcacgggttattatctgggctctgactatactgagtgtgagcttgctgactaaatatcagagtattagaatggacttggtgtgtgagtaaagtaagtgggggttaaaaggaatgaagtgctgcattcatagatgatagtattaggttggtgcagatgtaattgctgtttttgccattacttttaatagcaaaaaactcaactatgtttgcaccaacctaataaaatttcataattaattttcctgagaagtggcagggacaaaattaacaaacataatggacaatttaagtaaattatggtgttaaaaaccaccatcgatttttataggaagcaagggttttgatgaacagtgttcttacatttgtagttgacaccaaggacaatgacatcccgtcctgacatagtccttggaaccaagttagagacaatgccctgggttggataaaccccatgtctgaaaccagatggggagcatcccactgccttttaactaatctgtcattgggccaccgctagaatgttctggggaccgagtaatctttggggggttagaaggcaatgcaatacatgtatcgccccgccctcagtccccagccccttctctgtcttactcagttggctaaaccacagcccttgttgaattcacctctcctcctactcagctactgcacctacataactgaatgtgtctgaaaagagacgagaacatcgtggcgactgcttcattttaagtttatggctgctgactgggcagttagaattctctagccccttgcttctccctcttcctggatggctgatttattccttttccttttttcttaaaactaggatgcctctttttccatcttccccctcagcagatgccttggtttcctatttccctaagaagataggagcaatcagaagagagcccccatggccgctcaccaacgcacccacctgtctcctggcctctgtgaccccgggatccgcctcctcacctgccaccagggagactagccccatccctgacacagccccttctccagggggtgcactgaatgcctgcccctttgtctactctacagacacttctcccttctttttccttcacagtcagcattttcctctttatggggtcatccttaccaatatgacctgatcttaaacaaaatatgttttgctccagtgtcatctccagctgagacccatgtctgtttctctccacacagcctccctggaataaatgtttgcattctctcctgtgtttatccctctcccagccaggtatcctcccacaccactccatgccattaagcgtgaccacacgtggcatgagaagctcatctggttgccaggtgtgtgccaggtggggcggggcccagatgtgcccactttgggggtctccaagtcctcgagggctgcagggtgggggctccgcagcttggtcttactctgagaccacaatgatctccaagttgctacatacggtggtcaattttcagttttgtgctgcttgtgatcagcagcattgacatagccgacgttctctccatctggaggtgcctgctcctcttggccgtctgctctcactgcctcggtgccctagctggtggctcctcagtgcacacctcctgcctgagctccaccctcaactccatttctcactgagaacaccagatatctgcactggaatcttcttttttattctttattttgtttattaatttattttttgacacagagtctcactctgtcacccaggctggagtgcagtggcgcaatcttggctcattgcagtctccacctcccaggttcaagtgattctcctgcctcagcctcctgagtagctgggactataggctcatgccgccacccccgggctaatttttttatttttagtagagctggggtttcaccatgttggccaggatggtctcgatctcctgaccgcgtgatctgcctgcctcggcctcccaaagtgctgggattacaggcgtgagccaccgttcctggcctagtctttatttttaattgacaagtaataattgtacatatttatggtgtacatagtgatatttcaatagctgtaatgtacagtgattagaggagggtaattggcatatccatcacctcaaacatttatcatttctttgttttgggaaagttcaatatcctccttctagccatttgcagtgatatgatataaactctggtcatcctgcagtggcctggaacatgaggacttattcttcctgtctagttgtgatcttgtgtcctttcacaaaaccatccctatcctcttccccctccccttcccagcctctagcatcctctgttctactttttgcttctatgagatccactgttttttagcttccacacatgaatgagaacatgaggtatttaactttctctccctggcttaacttagcataacgtcctccagttccacccatcctgcggagcatgccaggagttccttctgctttctggctgggtagcattccacgggtatagacagcacattttccttacccattcctctgccaatgcacacgtcggttggttccatgtcttggctcttgtgaatatgcactgggatgttctagtggctgctttaatgtctcaatttgctaaccggcttcctgtgaacactgcctcccaccccagacccacctcctcctcatattcccagcgcattgaatgagcagctttcactgcacagggcagacacctggacccatcctctgtgcttgttcttttgtcaaatctcacatccagtctgccagtaaatcctgttgagtttgtttccaaaatattcccctcatatcctacccgggtggtcttcttaattctgcctgaaatcccttgaatccgttttcaacactgctgccaaagtgatcttagaatggaagtcagataatgtcactccgaagtcttagtaacatcccgtctcccctggaggaggcaaagtcactgtggtggactgtgaggccctgcgaccggcccctcacctctgactacagctctcatccctccctggctcacctcaccctcactgagctccttcattgctttgaatatgtcaggcaaattctgcatcaaggacttcacccaaagtgcttttcctccaggtacacatgtggctcactccttcccctcttctggggctctatttaaatgccacattctcagtgaaacctcccctgttcaccctcattgaaattgcagctgcctcagttgcacctccctgcttgatttttctccacggtattggccaacttccatactacgtatcttttcattcattttttttttggttgttacctgtgttccatgactaaaatggaaaccccaggaggccaagacttttacttgttttagtcactgccgtatcccttgtgcctggagcagtgcccagcacgcggtgggcatgaggaagtgtttaccggaggaatcgctggactgccgtgtggtacaaagaggacgtggaagacctagggcttattttctgaattcactactcctggctcatacattcttgggaagttactcaacgcgttttgtgctggtttctttccatctgcaaaatgaaggtcacaatgtccattctcccaaaattgtttgtcaggattaaatgaagtaataaacatgaaaagtactttctaaattgtattacacatgcattaattaacatttaacaatgctatttataatcatttgaaaaaggaaggagaggggtggatgacctagagttgtagactctcacttctgtccctgcagaagccgttggcgtttcctatcaagcaacaattttggactttccttaggggatttgtagcttgcttattatagacctaagtggagaaggtaacctagatttccccttaaattacgaggttgttcttaagctgagcgctgacagttgccttgggagtatggaaacttaggggtttctgcgtcctcaaattggtcaagttgtgacacgtggccacagattgtagaaaatggctaacaaaacaacatgagtattttgagggtggaatttctcctttatgcttagggtatgccttcttttgtggctgccactgacctgcagtgggatattggtgagatactgattctctattcactgtgtctttactcataaagcatatatcatatggtattttcaggtttttttattctcttaagaaaactgtagagcctttcagagaactttacaatcatttgaattaatttgtaatttccaagaagaatcaagaaatattccacagatcaataattctgaaacaaagaaaaatttacgtctgaaattgaaattaccaagtgacctagttacatcaacccatcttccttcctccaccttatttgtctcctttctgtgatctgaagtgtgtgctgaggaataaaacttgtggtaaggagggcagcccagcacaccacccagtgtatgggtgaaggaggcagcagtgtggccggagaggagagctgggctgggagcacaggaaggtccccaggactctgtggtcatcagtaagagagggcccacgtgtatatgctggtgaacagaaatgtcaaccttttcaaagtctgacatttaagagaaaaaactgtggctgttggtttgtggaacagacagctccttctttattggtaagttttttttttgtcttggaacttagaaaatattgtatttcttttgtctcaataattgttttatgctttggaggtaatagagtattacaaaagtttatgttatcaagtcatgcattgcgaatacttatttatttaggctactttagtcatcccaaaaagaaagaagagatgctgacctttgttgagtctattatgtgacatgctctattctagagactttggtatgtgttattttatgtaattctgaagacaatcctggcaggtaggtgtggggctattttaaagagttagggcggtaaagtcacacagccagaagatggccatggagggttgggaggcagatttttctgatcctagtctgtgttctttctatctcacaaagacattccataccatctgcaagtcgcttttgactagcactcgagaaagaagtatggggacattggaaacgctctaatagaccacaaccacctttgaaagagcagtcatctctatgagccataactataaggaagaaatgcagatcccacagaccaaaatggaacatgtctcccaaacttctcaccctgggggctgtggctgctgcagaatggggggtgctggtggatctaacatgaatgaggctcggtggaggggctggctttgtgcagggaggttgggatgaacaagggcagcaggcggcatcacaggtgagaaggacatcccaggagggaggaaagagccacagcgtgctgacgaaggtgggatggggtgaggtgggggagacacagagaagcccagagccagcctcgtggaatacacagatgtgtctggaacgtgtgtctctggatacactgatgggtctgcttcaagagaattcttgatgctgcaatgcatcagaaggagttctagtgatagcattgtctcccaagtgaaagtgataaaccagtgacaatcagtttcactgtgttgtgggtgaatgcatttatgtcatttaacaatactgcgattccatttgtataacaatctcggatgcacttgttgtaattttgcattatgtcttctctaattaaacatctgaaccctctgaggcctgacttacctggagctctcttatctaataatatcaacctctaaggcagcctgagaaagaggaaatgaacccaaagagactctgcaccaaaatagataccacgaagcctgtacccaaacttggtgtgtttttctcccaggggagaccctcaggtgcacattcagatacactggctcttattttaggcacagttctgataagggggggctgtttggtttcccagcccagagcttattggaagcagcacattcagtgggaatgtcacctgctggagtcaggcacgctggaagtgatgaggaatggcagacagccaggtgcagtcaagaggtgggctggaagaaccccaaaacacagagagggcaactcagtagacctcacatgggcccatttaatgcggaagcagatactgtagttccaagtattggaaggatctcagtgtggaatttggtgtgctgctgcagatgagaaagcacacgtccccagcggctccacgaatggggcccaggcagggttggacgacgcccagctcccctggagacagccagaaatctcatcacatgtcttagcaatattttcacccatcagatcccaagttttaaatgtttaaaatgattagttgaaaattaatttggaataggcttccccaagaccaaaatgttggttggacattgctgtgttgctgagtaaaatacagtaaatatgcagcgcatccttcagcgttcagatgactgcgttagagaggatggggcatctaggcaagacatgcattcctctttactttttaaagcactcctattttggggggtagaatgagaagatggatagatgaagaaagggaaaatggaacaaagaaaggaaaaagggcagggcaaggaagaggttccaggataaaatagacatgagatcttatgagcagagatcgttagggcagggtgggtggaccaggtcacacaaccgtgacagacacggctctgggctctgacaaccgcatcgcagcagacaggatcaagatgcaaagcagggcccttcggcagccggcgcatgacctagagctgggtgtaggaggactctccggcagcttctgcctctccctcctcaccttcccttgatcgggcttatgtcatgaggacgtcatcctccctgtgctgtccccacctcctgccacacaagctgcctgaaatcctaggggctggtggagatggtggtttgatgggttataaatcacgtgacttagctgagacggtctagctccctcctgctcccaggtggtcttctgagcagtggtagacctcgagaggagttcagaatcacaggaccgcaggacccagccctggtctatccacccagaacctacatttgaaccccaaggagaggcaattcataatcacagtgcacttggaaacccttcttccaggcataggaaaccccagtccagaggcatcacttcatatttcggaggggttactgccattgagtggcctaaatttcaaaccctggcacggagatgagcagggcccccttctctatgcagagccccctggccgaggcctgctgtgacggctgctgtaaccagcctgtggctctgacgtcaccgtgcacacgtcaccctttttcatttctgtagcagtttataagtcagtgaggctgttcccggcagacagaaatggaaattagcactctgaatctgggtcaccgagcagtgctgtaaatcccaggggaggccccgtccttagctctgcatccagtgaggacctgaggtgaggatgtcttcacagatccaagggaggaggttttagacacataaatctgtgtgattatccaatggcaagatcatttgataggagatccccaacctaaaaagaatgtggctttcagatctctttctggtagacaaacagatgttttagtaaatcaaaaaatcagccttgtgagtgtaattaaatgactacgtaataaaatcagtcattttcctttggtctttttgtcagaatgagtcttcaggttctgtaaagaatctgtctcctccgacatacatcgccaagacagcggcgggctaatgggggctgtgctgcccactcctcagacactggatgggggtctcactggtccaccccgcagttggctgctgggtcagagagtgtgccagccagaccccagcgcccagcgccctctagatgttgcagaagggcgagagaggctttctgtggtcctcattctgtgagcagacctgtcctttctggcagtcaattatgcctttgcggaatatgattgggagatttttaagtaagtcagaggaaaactgattctgctggaagtcggttttagagctgctgagagctatttcattcatcataaaaatcttgttggttcaacaatacctctttttccacattcctggtgtttaagcagggtgccttgtccaaaaacctagtgtcttttccccattttctgtatctgacttgaagcaaaatagtattgtccactgttctggaaactaacacagaaagaaattgtgactatggcagcactcacacaacagtttatctggaaacgtctagaaggtgttatttttccagcagtgaaaattagtgatatccataatagtcactataattagtccttttgcttttcttagaaattctgtttcattatgcaaccaacttattttgttattaaatgaaagtacaaagagaattttttaataattacatttcttatatttctacctccttatacaaacaccattatgattttcatgtctcttctcatacttgtgtcagtttctcacttttattgctaaaattttgcaaaactgaggctgtatctataatgtcatggtcagggttggaagtttaaatttgagacctcaaagaagatttttcaaaggggatgctatgaaaagctccccattttcctcctagttcaaagatccgcaggcgttataaagcgaatgactactggttaggtggaattcatttctgaagccgtggctgccgccaggagggagcacaccagcaggcgtggatgggcgttattgttgtgtcttctttcttgaaaagctccagggtccaactgcaagaagagatcacgagagagaatgcggaactcctggctctgtctctggagaacattccagaggttgtgctggagccagaaggagcgctttcttatgctgctgtctccttcccgaactctccagagcctctggagtctttcaccggggcctccccgccctcgctccctcttgggaattctctctctccagcacccccgacgctttctgttttagatcaaattgacctttctggcttgacaccctttccagcacaggaggcagctgggcctttctctgaggccctcctctcagcccacagcgcggcagatccctgcggggaaatgtgtcctcccttctcccagcccaagccacctcctcccacctgcatggcttttggccaaagttttccttttgcttcaactgagagtagagctgctctttctccctgcaggcacccttcacatactgacggcagccgccccctcggccttccgctgcaccccgcccctcatttccagtggccctcttgctttctcaggtgtcagggcttcccgcctatgccaccccctagcagagaggcacccaggggtaccctaaccattgcagaggagaagggcgaccgcctcccagtcccggacgcctgcacatccgttaggcccagagtggctgctcttcctgctgtggcagcactgtcctgattttagcacagacgtttctactttccgggaagtctctggaaaactgggagggttggccccctaatcctgggagtccaacaggaagagccaggaagataatgctgcaggagatgacccgtcccgtgggtgagggttccctcccctcccgcggtgggtggagggtgagtcctgtcgtcctcctgtggcgggagagctgtccatcatccatcactgattcctctccacttctgcgctgttcctgagggctgagcacaaagcctccttagaaaaccagagttcagggtgcttagatggaaagtgtccaagaatactgctgcgtctgcgaccacctcagcctctttatccctccccaccaccgtccccgcatccctccctaccaccgtccccgtccccgcatccctccctaccacagcctctgcatcctgcctaccacagctgcatcttatgtcagaagagtgttcgagggatctgggctgagggaatggaaggtgttacctgcttgttttcagttaaggaaataacctgtctcctgggtttgctgcttaccggaactctattttctttttttttttctttttttttttttttttttgagacggagtttcgctctgtcgcccaggctggagcgcagtggcacgatctcgactcactgcaagctccgcctcccgggttcacgccattctcctgcctcagcctcccgagtagctgggactacaggcgcgcgccaccacgcccggctaatttttgtatttttagtagagatggggtttcaccgtgtcagccaggatggtctcgatctcctgacctcgtgatccgcccgtctcagcctcccaaagtgctgggattacaggcgtgagccaccgcgcccggcctctattttcttttttgagtctccctgtcagtccttaatgttttccacccctgtggtctctattccctcaatgtattcttccttcttaaaccctttagttaagctctcacttggacattcttaaagaaattttgtctcaaagagcactgagaacagtagtgatgaaacgcgcaggtcgcttttcagtgctcaaattcttcactctgcaggtttcctataagcacttttctgttttttttttttttttttctttaaagacactgtactaatattttaggacctatcctctggccacttctgaagtgtcacttttccagcttcagtctgtccttctgctttgtaaacatgagcccaacatcccagcagttccatcggcgtctctgggtttaattacaacctctccatgcaagaccgttcctgcatctcttgctaagccccctctttatgactcaatagtggtaacttccacccccatctctaccaccacgacaacaatcataattacaaagctgccactgtgcacctaatgctgtgtgaggcatgaactttgtcttcgatcttcacatgaatcatttacaaatctaaaatcctcgtgtattgattaggagacagacatctagaggttaacttgaaaagtgactttcgattcttgacatgagtctaaagtcatgtcaagaatctccaagaattttcagttacacgagacatcaatctcttcacattccaggtacttcaatgacatccattttcttccctcttagaccggtttctataactgttcttctacgtagaaataaattagtaaataaaaagtaagctttcagtttgatttccctatttctgtcccgatgtaaaatttggcatcatcttgattccccttttgcttgttccttactgatattttccaaaacatctccccacatcattttctcttcacatgtatcccagaaaggtatgaacttttggatcagatgacatggttttgagattggctcttcaacttattggtgtatgaacttgaggaagttgcgtttttcctctgagtttcagttttctcatctgtcacttgaggaggactatgacaaccccagggcccctgggcctttagtgaggattaatgaaaatgaatgggtgaaatggcgagggtcagccccacatgctggacgcccttggtcccggctcccttctctactctgtgatgtcaggcagggctgccgccaggaggagggtgcacctgccctgtgacctgctcttctccctaccgtaaactcgctccctgtccctccacggcccacagacgtctgtgtctttgtattgctgccagccttccggtcctgcagccaccctccccagctccccactgagggctggtgcccccacctgtccttactgctctccacctcggtgcctttctgcctccccacccaggctcatgctgtttgtccccaaattgccttcctccccctgcctacctggtcagatctgagtcgccttcctggctgagtcccagcctttcacgaagagcctgaagtccaggatgctggaggtggaggagctcctctgtgctccctcctgtgaactggacgctcgcagtggcatttcttcactgatccgtcacacgtaggctctctgcatatcacatgtggcttgtattgtcatgtatttaggcctcaactttccaactatatgagttcccaaaaggtgggaagtaaatggcatacttttaactatttctgtagcttgtgtgctgtacatagtaactatctgaaaaaatgattcgtatctgaaaaataatttataacaggtgttctcctggctatttgggagagtaattttcaggccagctactttatggggtagaataacacagagtgactccccatgcccaaatgtattagcatatacagtgagcattgaaggatacaccatttgacatcttcgtaaactccaaaattcaaggtgtcagcacagcttgtacttcctcctataaaatgtgtttttgtccctactagagaatttgctgatgtaatttgttaagtagccttttttaacttttttatgaagaaaaagatatagatccaaaccacataacacagatccaagcactgctgggctcggtagtctatgtttttgcaatgggtgtgagcctgtggctgcctgccagctgtcattgttgtaggtttcttcttcctgtccctccactctcagcacctgtgctaactctaggctttcctggggagggttttgtaaaaaccaacaaatgacgcttttattttaatttgttttgttttttaaaaacatgttcattacttcagaagttttgtgcgcacaatgagagtagaaaactgccccagttatctaccaccttgagtcatggtggctttaacagtgatttatttacaatctcttgtggctctgggggtcaactgggctcggctgagtgcttctcagttggggcctccactgcaggtaccatcagagagtgggtgggagccatgtcatccgaaggctcgattgggctgggggactcccacatgtggccggcaggtggtgcactgctgctgcctggtatctcagcaagaattcccaaccagctcaccatattgacttcctcaaagtttatacagagtgttactttaggggttaacaaagcatttactatcttttcaactttgctgataatttcaaaagatgactgacacccagatgaccaatgtccacaaagtggtgtgccatggcctccagtgtgtgtgctatggcctccagtgtgtgcagagcctgtttgtgaattaaaggcaatcacaaggagaaacggtcatggtgacccattctgagctgtacacagtgtcctctgtaggattgtagccagaggcagatggctttcctagaaatgcctcaatgttgagttttaaagcaactccttatgactgttatctgaatttaccaaactgtccctggcttttcttaggaatgaacttctgatgttgctgtggaattttctgcctggaaacttattgttatgaaacatgtgactgtaagccacattcctcgccttttatgcacctcacagtgtctatgcaaatgaacagtgtgattttaaatttgaggaagtttcaataagagtgagatctaagaggatctttaatataggggcatttttagagagctaaaaaccaaataggtctcagctttctcagggtgacatataatttagatttgacttggaactacagaaggaatatggggcaaaggacatgagaaacattgcagaggtcagtgccatatggagcttccacctcagctctcgaagtaaaggcaaccagcccaggctgggagccagtcagcagcagggtctcaatctccatccactaccttcccctctggggcagggagggtgttgcagggaggaggccactcttggagacctccagatccctgcctctgtgcagtctaacagaaggggcccccacagtggccatgaatctctttgttctgcaaggaagggggtgtcattgggcctcctgggtccctcagcatctgcgtggccacacaacgcggttttgttcaacacgttacatttctgcttaattaatgttcatttttggtccccagcaaagtccaatctgtttttcgttttctttcttttctttccaggcaggcattgccagggctaatcatctataaaagggcttactttcttaccttcacgctaagcaagaccatccaagggcagtgttagagggcacctgagaacgcaggaggggtgtgttacctggtggcctgtttcttcctcctatgggcagcccttctacaggaagcagaagcctcaggggcgatggtagaaatgaggaggaggggatggagctgaggtagcaggggaggggtcgtaagagcagaggggagggtcttgctttgttcgccatccaataatcagcaggtttcgggttggggtgaactactggggaggagcgccccagggcttctctcagatggaggagggacaggtcacccagagtgaaggaagttgtgagctctgttagaggaaaacagccaggacttagtcaggagaggctttgtttggaaggattgttgtaaggcagggagaggaatgatggcagcaagaggaccccgtgaccataggtctgcaagcacttcaaacagaaaaggcccttcttttatccagtaagggggagccactggggccagcagagtctttggaggggaccctggacaaacccgggaaaatggccagtggggttgagcaggacacaggtcctgctgtgtctagctggttccccagagagatgataaggggtgcgctccagcttctcaggctcactcaggcgtgaggacgtggagctcagggctctgcaggaaggagcgacccaggtgaggtgtggtcaagatagagcagagctgggcagcgggcagtggagcctcgtgggcagcctgggggtggggaggcacagtgcactgggaagtggagaaagtgtgagtccatcaggctggctgagaattgatcacgaacctattgtctgtaaaacttttgttatttcctgagacgtggttcacagcaacccaggtgcgaacagccttgtgattctagggttcttttctattttttaagcacttgcatctacaaataaatttctgagtgacttgtcgtcagctgctttccttgatatgtctaaagacagggcagtgacccgcatcgtcacccagagattctgtctctgtgccacatgaagattaggtgcccgcttttgattgaggagctcctctgttgctctcaaagtatcttgtaataatagctgagatgcatggagaaccacctctccttcaggcgctgctcctcggcttccgtggacgggcatggctatttctcggaaccctctgaggttagagctgtcatggtctttcttctgaaagaggaaaccgaggcttgctggggctcagtggcccttctgtggctgcacagctttcggggtggggccaggactgactgactccacacaaaagtgctcccggcccatgtctttaactcacacggcctcttgcaaacgttcccaaatcttcccagtcggcttgcagagactccttgctcccaggagataaccaggtaaaggagtatgaaagtttgggtacaaactcattgctgcaaattgaaaaccatgcaaaggctgtcttcctctggggagttcaatgcctctctttttcttatcactttaccattggttggactttgattccagggatcctacgattactcaataccctacaggatatacatggttaaccatttgcatttgggcaaataggcgttacttttcaataggaagtggcaatccagaacttgcttttgggcaattctagtagctcaccgcttttttcttaatgactgctagaagctgcatcttattgacagatggtcatcacattggtgagctggagtcatcagattgtggggcccggagtgaggctgaagggagtggatcagagcactgcctgaggtgagcatgccaaggcccctgagacttttctttcaaaaatgtaacttctttgatcccctagtctgacaggaatgggactgttttactcattaatcttccagaatgctggcatattgaccatgtttatgcttaacgacacagacttcctttcctgaaagcattgactttatggttttaggaagcccacttttcctctaagtgtatagtaagggatttcatactcgctccctgcactggagcttcggtgatggtctgggtacttgctcctcatacaggagatatcctcagggcatcagtctggagaggaatgtgattctttatttgatcaaatacactgaaagattttggaaaacaaaaaaattaagctaagaaatattttggaggcagtaagtcatttatgcaatgaaggctgatgagtgggcatcccggacagcctaagattgagcaggaaggagcttgtgagggggagttaagagaaattgacaaggtggaaatttcaacaagtctcagttgcaaagctctcatgagggctgccaatgccactgtgattatgaaggcagtatcttatgaccagaaaataatacacaatgatattaaagggagccaggctaggtgcagtggctcatacctgtaatctcagcactttgggagaccaagctgggtgtatcagctgaggtcaggagttcgagaccagcctggccaacatggtaaaatcccgtctctactaaaaatacaaaaattagccaggcattgtggcatgtgcctgtaatcccagctacttgggaggctgaggcaggagaatcactggaacttgggaggcggaggttgcagtgagccgagatcacgctactgcactccagccggagatcagctccaaagtccacttagcagcaggacatagatattgtagagatcagctttataaagaaaaacaaaaatgcaaggccataactaaagctattctttaaatggttaaagatgtaatttctgcaaataaaacagaaaacataaaagcaaacttccaaagaaattaaaggaactgaaaaaaaaaaaaaaccaacccacagaagcttaataaacaaatcaccgggggaaaacaaaaaaaaaatcaaacctcctggtctcctccttagccactctcattcaaaagcagaaggaagccagcctagagtttcagctccactgatgcttatctaaaaaggtataaaatatggtgggcccatgattcaaataaacttagagaacataaatgtattgaacacctaccattacagtatgcaaaactctgatatcaataagatgttttaaaataaatatattatttaagatcttgtgggaattctatggcatttcactaagacctgctggtggcaaggtgaattagaacggcgagtaagagacagtaatgggagtctcaccagtactcacagtcctagatgagctacactcgctatctgtaaaatgggtatgatgtctaccttaaagggttttgtgaggttaaaagagataaacagctgtaaaccagtgattctaatgcctagcaggtaactagaacttaatttacagcatatgcgcgcacacacacacacacacatatgcgtgcatatatacatacacacacgtccatatgtacacacacacagttatacacatactgcacacacatgcatgcatacacacatgtatgtatacatgcaggcaccaatatacacccatgcacacacatgcaaatacacacatacacatgtatacacacatgtgcacacctatatacacacatgcatacacatgcatatacacatacatgatataaacaggtgtatatatgcaggcatatgcacactgcacacatgcacacatgcctagacacatacatacacacacaccgacatatgcacacacacacacatactcttatttagttcttgctccttgttttgcagggccactactatttatgaaagtaagcacaaatttaaaactgtctgacaattgtaacacattgttaagctagttattaaatgtttttaaattacaagtccacacagtttttattaccagtaatattttcataactattactaatgttttccccatattgaattttcttggacagagtctgtccttggccaaagggatgatcaatggcagtcggtctgttgcttggtccccccaacccctgctcttcttggggagccccccacccacagctctcaccggccttccctctttgctaccaccacagagccagccagtattggtctccctgagagtgtgtgctgtggctacccacctcttctggggccatttgcctgtgattagaggactcccaatgccctcaagtccaaaaacatggttttctctaaggtagaggcaccgttgaaggccggggggagatgagtgtggctgtgtttggagaactgaacacggccttaaatcctatagtgagggcagcccctccctctttcttctggttctgctttttagcagaatgtataattaggtgttcttttcatttctaaatgaattagccaattaattattactttctgagatactctattgcatattgtacctaataaaagttgtactaggaagccacattactttattgcaataaaaattgcaaaaaaaattgaacattttaaatgctatgtaagaaatattattctggaattaagtttttattaaagtaacagttttaaacatgtgtgataacaagatctttgaaatgttaaaattgaaattcagaggctaagttattacttaccatgtgcatatatttaatcttcatgagatcctagtacatttgcatttcatttaaaagagtagggtggtggcttgtagtcccagctactctagaggctgagatggtaggatagcttgaggccaggagtttgaggctgcagtgtgctattatcgtgcctgtgaatggccactgcactatagcctgggcaacatagcaagaccccatctctaaaaaaaggtagtttatttatatgatttcaagcctaaaatacatactgaagtatagcttatcattatttgcctctaagtaagggaagaaaaagccattaaaaatatcttttaatacgagtttatttctaagtctaacgtatgtccacaaagagaagagaatcaatcagacgtgaggcctgcacaacttttgtttcatgcatttgctaggggaatggaggcacttcaagtcagaggctggtgtggggaccagcacaccgtctaaagattcctcctgtgtttgccttggtggcaccccttgccacattccctgggtcaggcaatgccagccctggggggcctgtgagctgctgcagtcaggtggtgggtgcatgtagccatcttcttgtcttccctctgctgttgcctcgaatagggattggcccctaggagctgctcagacctgtctttggatgaatgaatgaagagtcctctaggttagtgatattctttggctgtgtccccatccaaatctcatcttgaattgcagttcccataatccccacgtgtggtgggagggaccaggtggagataattgaatcatggggcagtatcctgttctcgtgatagtgagtgagttctcacgggatctgatggttttacagggggcttccctcttcgctgggcactcattcttctccttcctgccatcatgtgaagaaggatgtgtttgcttccccttctgacatgattgtcagtttcctgaggcctccccagccatgctgaactgagtcaattaaacctctttcctttataaattactcagtctcaagtatgtctttattagcagtgtgagaacggactaatacagtcaacttattgatcatatggtttatataatcatacatctataattatatagattatatagtcagattatatgatttatatcatcatataaataaactaccttttttaaagagatgaggtcttgctatgttgcccaggctggagtgccgtggccattcacagacacgataatcacacactgcagcttggaactcctggcctcaaaaatttcccaaagtgtttccaaagaacaggaactgaaaaggttctgtgagtgagaaggtttgggaaatagtgagttattccagcagggctctgaagggccactgataaacaagctctaataggaataaactagggaaggatgtagttagcatcttattaatgtcttaatatactagccacagagaaatcatttcccacccctgtctgtctccctcccttctttttacccagagcatctcttggaactcacttttagatgctggatgcatgaattccctaagaagaaacagctcctaaattgaagtatgcattagaataatacagagattgtgttaatgcaaggatttgaatcttcaaagcagacatccataggatctatagatcttacctaatgtcaaactttactaatgattcaataacaaaaacactaggcagagagatgcatcccatgttggctgggctgttctcaaactcctggcctcaagtgatccacccacctcagcctcccaaggttctgcgattacaggtgtgagccactgtgcccagctattctgtgcttttagataggggttcccaggcttctttccactagtaagtactatttgcatgtttacaaggagatctggtcctcgcccaatccagtcatgggcagagttcagttctttgtgactgtaggactgagatcctcatattcacgttggctgtcagcagagggcctttttagcttctcagggcaaccacatggctcggcttgtggccccctcttctgtctgcaactccagcaacaatacattgaatctctcacctttgaatcttttcttctcccgtctccagggagaaggactcttcacctctagggactcgtgattgcagtgggtccaactagataatccagcatgatctctgcttacctccaggcccttagatctttgacttcattgcatatgcaaaatcccttttgctgtgtaaggcaacacgtacacaggttctggtgcctgtgtcagggcctgggcagggggccatgattccgctaaccacaagcgtgacatggggccatgattctgccgacaagtgctgtcccctgtgtccggtgcctccgcgctctatctattattgggttggaaagccttagtgaccacggtggagagtacccagaggtgagcagagctggctggctttccagctggctggatgtctgcgcccacatagtactgattaactagcctcttggtgagattactagcaaataaaattcttaagatttttgctgctgctgcactttcatcttatatctgtgtagttgcttatttatttttgtatttttattttttatttttgagacggagtcttgctctgtcacccaggctggagtgcagtggcacaatctcagctctctgcaaactctgtctcccaggttcaagtgattctcttgcttcagcctcttgagtagctgggattacagatgtgtgccaccacacccagctaatttttttatatttttggtagagacaaggtttcaccatgttggccatgctggtctcaaactcctgacctcaagtgatccgcctgccttggcctcccaaagtgctgggattacaggtgtgagccaatgcacgcggcctgcttatttaaagctatgtggagaagcttctattttccctactgaattttacaacattagatttacccattgcttgattctgtccagaatatttgtacattgattctgtcatccaatatattaattatctttttaggcttcttgacatcttcagatctaatgaacttgcctcctctctttttgcccctctcatcaatagaagcaatgggcaggacacagctgaaggccgaaatcagtgcagtgtccatagggccttgtgccagcctgccagcaaagtggtgtcacagagccaattgtccagacacctagcaagccacctaattgtacttgcacctggatcatggttcctcttcttgattgcttataagtttcagattttatcgtaagtgttcaatgtctgtaacacctccctgatctgcagtttattgactgttaccaccaaggcttggaaatcagtgtgacatgactgagtgttaccaaacccacgctgacccccaagggcccaccacttccgttccagacgctcctgcacttgcttcataatgccctcaacaccctgctgagaaccaacagccaacattttacctcattcggaggcattatcttctttctctctgcaaatgggttttgagcttccttacaccagctctatgctcctggacttcacaggcaccattcgctggagtcaggcaaattcactgcaacattccctgaatatttttgaaatgctttttttaaaaaagagtagagaggtgccaaacaggaatcaagaaattctgctttctcttgtcttcagaacatgtgataaagctcagtcaatgagatatgccttcctggtgaaggagatactcaggggatgagacatgatgagtctctcatttggtgtcatgccatagtgtgcccgccctacagggtaccccgggtcctgtgagaggctaacattcaggtggggggtgacaatgagttactgagacagcaacaatcgacactttacttgaggcagctgaatattggaaaagaagcctcttaactgcaaaaccgaattgagtcaaatgacatttctaaagtgtgtcattagatgactttttcttagagcccctgaaactcctcctccaaagaacagtgtgtcctacagaagctctagaagtattcctctgcccacttgtttgggaaatatctaaattccaaagacaagaaaattacactttaagaatcagttgagctgaatgtattttacatgtgatttaatgacatcaaagtgagatctggtgagaatggtggtcatagggaccacgtgtgagataggaagtgctgaacctcaaagagacagtgtgagatgtgttgcaggtggctgctttgcaagggtaggttcactggttcaccaagaactggacacagggctcagcacatttccctgcatctctcatctgccactcgtagataacagggtgtcttattctcagttcattaaagaaggaacagaaatatctactaaaaaacttcttagtgtcttcacatcaacattttcttaatagaaaatctgcagcctgtttctccaaggagctggtgactgctgcctgagatctgagatgatagagcaagttgtgaacaggattctttacacgttgaggtgatacccacgccaatctgtcaccaaaacagtttccttaaaacaattcacacagtttttcctgtgaaaacagtggcttggggaaggccgaatcattttcaatgactgtggctggcatacaggtgaacctgacaaccaccgtttttatggagaatcctgattcttaaccacagtgacattaaatttgtcattatctagaattgtacattgtttatacctaacacgtgcaaaacaccatcctaagagacatggaatttatcaattttggttcattgacttattctgacatgagaataaatgaaaggaaattaaagtagtgtcttatgaacaggacggagtaggccagcttctcatagctctgccgggaacttcctgccctgtggcctgtgtatctggttccctctgggcctccttctctcagggaccccaccctctgggcccccctccctccgggactcctccctctgggaccaccctccctctggaccccctccctttgggacccctccttctgggacccccatccctctggaccccttctctctgggccccctcccaactccttctgccgacagggatccatcacacaggcgccccagtgctggccttctgttcaccaagagttactcactttctggggtgcatctcgtgatgactgctagcatggaaccgttatataattacttgtttacctggcagccttttgaagctcaagtacgcgttgagtcatcgctgcacttcagtgcctctcctccgtagacagttcataaacatttgttgaactgagttcaacttaaattcagaaaatactgtgtgtcacggtgcagttaaacaaatgcttaccttaaatgggggcccgttgggcatcgagtgcacggcgtgccgggccgtccctccctttttggcccccgctgctcttcccatcgtcatcaactcagcctccacgtgatggggaggtcactccctcccatccggtcccagccccactcacctgggaacccgtgccgctggccccaccttggcctagcatccgtccaaccctgcagcgaccgctccccacagcccctgctcccttgttctccagagccgcgcccctgctgcaggcctccccctcgctgtccccaagcccctgccttccacccacactgcccactccttcccaccgtccccgcctctgtccttatggagtcctcaaaagctcttcttgccccagaacctcccattacccctcagtgctcagcggcagatccttgctgtgactgtttatggcactaagtgtctgttccaacacatttgcgcggaagagtacgcaggtacttttaaattaactttattgaggctaatttatatgcaataaatgtcaccgattgaagggtacaattcaacaggtcttgacaagggcacccagccatgtgccacccccacaatcaggatagaggacatttctgccaccacaaaagccccttgtgtcgcccaaccccagccaatcccttcttcccgtcctgatgacaatccctgatttcattcctgccactgttattttgccttttctagaaatgttaggggtggaatggtgcagtgcatggtctcttctgcctggatttcttaccgagcgaaggttttgagtcacccccgttggagcatgcattagtcgcccgttccttttcatggttgagtagtatatgctgttgcatggatacacttcaactcgggtatctgctcaccagttcacagacatttgggtctttttcagtttgggacggttaagaataaacctgctgggaatgttccagtgttaatcctcccatgtctcttgggtagacatgtaggagtcggttgcaggttcccatggtggatgcatgttcagctgtgcaagaaaggaccccactgtctccttggagtggctgtgtgatcttgcagtcccaccaacaaagtgtgagagccccagatgcaccatgtcctctcccagcttccagccccctgtttaatcttagtccttccagtgggatctctgtgtgtgtgtctgtgtgtgtgtgtgtatgtgtgtgtgtgttttggacggagtctctctctgtcacccaggctggactgcagtggcgtaatctcagctcattgcaacctccgcctcccgggttcaactgattctcctgcctcagccccccaagtagctgggattacaggagcacgccatcacgcctggctaatttttgtatttttagtaaagatggggtttcaccatgttggccaggatggtctcgaactcctggacttaagtggtccgtctgcctcggcctcccaaattgctgggattacaggcctgagccactgttcccagccttcattgtggttttaatttgcattttcctcatgattaatggcattgagcgtcttttttgtgtgtgtatttgccatccatgtattttccttggtgaattgcctgttcacatttccccctgtttcttattgtttatgtttttgatagggagttgtaaaaattatttgtatattctggatataacctattatcagatataagctttaacatacttttttctattcaatatatatatgtttcactttcttgagtgtctttcaaagagcagaagttttacattttgtacaatcaagtacaatttatcaatttttttacagttcattctttttgcaatttatataagaagcttctttttccagggtcacaaagattttctcccatttttccttctagatgttttatgctttagctctcacatttagatttataactcatttgagttaccttttgcaaatggtgtgaggtaagcagtaaggatcgactttttgttcatgtcattccaggaccatttactgaagactgttcttttcccattgagttaccttggcacctaagttaaaaatcagtccgccatctatatgtggatctatgtctggcctctgttctgttccagtgatttatgtaactgtcctttcagaaatccaacaccgtcatggttagtgtagttccttgtcagctctgagactgggtagtgtgagtcctccattttttttttatctttttcaaaattgttttggctattttaatttccttgaatttctataaaaattttggaattgacttgtcaatttctcaaaaaaaaaaccctaccataattttgatttagtttatgttgtatctacagatcgatttggggagaaattatatcttgaaattgaatctttgataaatttgaacatgaaatgtcattgaaaattgaacatgataaatttctccattaatttaggtcttatttaatttttgccaacaatgttttgtagtttttagcatataaatctcacataaattttgttagagctatccataagtattttacattttatgatacaattgtatatataattattgatactattatatatgatatatgtgtgtatatatatatatatatatatatatatatatatatatagttttaacatccaaatggtaattccaattggtgtattttattttacatattgtatatttcacctcccatgccctccacccctgccatgctctgcagcttagaaagagtgtgtatcatttctcactgtatttgttctcctcctgccaggatccataatcctgtgatgcctagtgccgaggtctgaaaatggttgttacattttgtaggtttttctagttgtttaatgcagcagggtgcctttggtctctgttgatccaccgtggctggaagctgaagtttagcagtggtgttctgattgctgtgcttcttctgattgatacgattacctcgtcacatgcttttgcaacacaggggtctataccacgcttcttctgcatactctaaagcactcaactgtatacctgctgggattacaaaagtgcagaggtgactccataccttcctccagctttttaggcccaaagcagtgactgaggggcagtgaagaaccgatctctaagttgtgactccaggcatcagggaaggaatggggtggagtaaataatgaaatgagaatcaaaattatgtaagaaataggtttggaaaataattcagggtgaactttgtgttacatgggcttcctctccaaaaggtcagtatccacgtggactcgtaagtgaggactgatatgacacagtgtgggggcgaggagggcagttccactttctctgcctgtgcacctggggctgcacttccctagctgctcccgcttggcatggccaggcccacgtggtgcgagagcagggaaaagaggaggaagatgggcgattggctgggaagcacatccaacgtcaatatcagagcgtttcaggccatggattttactgggggacgtccagggcgtgttaataaacaggatgatggacaatgctggaaagaaggagtgagcctgagaatagcgaagggtttttctttctttttaagtttgcttcagatggtggatttcaaagcccttcgtcctcaggcgctccacaaccgctccagctcttcccggtctcctgctaaacttcttcagcctggacccatgcaccgccactgctggcgttcccagcacacggtatactccattgtttcctgacaatccagttgattcggccaggctggttgctcagctgtttcacaaacatacagggctcatgactcaggactgctcttcagcctgagacgagctggtcacctgaaggagatggcggttctctgtcaatcattggcccatagcctcaccattctccaagaaccctgatcagagcctcctcctccaggaagtctttcctaactgtgccagcctccacctttcctctggcatttggatttctgatgattaggatgcctctgccacagcagattcatgcttgtgacctggaatgtctactggaaaggtctgcggctgtggagaagcaggtgcattcctctccagcgccttcccaggctggagcagcttgttcagtgtgtcttgagaacagcactcatagtcaaactttaaattctactggagattctcacatgcccacaggggtgatcatcactgacatatattgtgaacgatttaaagcccgggactatgaattatacattttctatgcgctttcacacttctatagattttgttcagtaaaatcttgttgaatgtttttaaattttgcgtaaagatttttgtgcagatcaaaacttgtggatttctgagagcaccttatttaaccaatagatcaagggttggcaaattatagcctctagccaacggaccccggcgaggcctgttcagttatgtaattgtagatgctttcaagctccaaaggcagatttgaggagctgtgacagagaccatatggcctgaaaagccctaaaatatttactatctggccctttacagaaagaggttgctgatgcctattctcaatgaatatttgtatgtaaaatagtgtgctgtgcactctgttcacacgagatggaatgctggtaacttaactgtctggctctccaggaatacctgtgttaactgtagtgcattttgccttctttccttcttagagtcacctctactttcctgctaccgctgcctgtgagctgaaggggctgaaccatacactcctttttctacaaccagcttgcattttttctgcccacaatgagcggggtaagatttttatttttggcaaggggtataatttgggttcactgtggctacttgaacactacactgcagctaactctatctttgtttcctttccaggaatcaatgaatttcagcgatgttttcgactccagtgaagattattttgtgtcagtcaatacttcatattactcagttgattctgagatgttactgtgctccttgcaggaggtcaggcagttctccaggctatttgtaccgattgcctactccttgatctgtgtctttggcctcctggggaatattctggtggtgatcacctttgctttttataagaaggccaggtctatgacagacgtctatctcttgaacatggccattgcagacatcctctttgttcttactctcccattctgggcagtgagtcatgccaccggtgcgtgggttttcagcaatgccacgtgcaagttgctaaaaggcatctatgccatcaactttaactgcgggatgctgctcctgacttgcattagcatggaccggtacatcgccattgtacaggcgactaagtcattccggctccgatccagaacactaccgcgcagcaaaatcatctgccttgttgtgtgggggctgtcagtcatcatctccagctcaacttttgtcttcaaccaaaaatacaacacccaaggcagcgatgtctgtgaacccaagtaccagactgtctcggagcccatcaggtggaagctgctgatgttggggcttgagctactctttggtttctttatccctttgatgttcatgatattttgttacacgttcattgtcaaaaccttggtgcaagctcagaattctaaaaggcacaaagccatccgtgtaatcatagctgtggtgcttgtgtttctggcttgtcagattcctcataacatggtcctgcttgtgacggctgcaaatttgggtaaaatgaaccgatcctgccagagcgaaaagctaattggctatacgaaaactgtcacagaagtcctggctttcctgcactgctgcctgaaccctgtgctctacgcttttattgggcagaagttcagaaactactttctgaagatcttgaaggacctgtggtgtgtgagaaggaagtacaagtcctcaggcttctcctgtgccgggaggtactcagaaaacatttctcggcagaccagtgagaccgcagataacgacaatgcgtcgtccttcactatgtgatagaaagctgagtctccctaaggcatgtgtgaaacatactcatagatgttatgcaaaaaaaagtctatggccaggtatgcatggaaaatgtgggaattaagcaaaatcaagcaagcctctctcctgcgggacttaacgtgctcatgggctgtgtgatctcttcagggtggggtggtctctgataggtagcattttccagcactttgcaaggaatgttttgtagctctagggtatatatccgcctggcatttcacaaaacagcctttgggaaatgctgaattaaagtgaattgttgacaaatgtaaacattttcagaaatattcatgaagcggtcacagatcacagtgtcttttggttacagcacaaaatgatggcagtggtttgaaaaactaaaacagaaaaaaaaatggaagccaacacatcactcattttaggcaaatgtttaaacatttttatctatcagaatgtttattgttgctggttataagcagcaggattggccggctagtgtttcctctcatttccctttgatacagtcaacaagcctgaccctgtaaaatggaggtggaaagacaagctcaagtgttcacaacctggaagtgcttcgggaagaaggggacaatggcagaacaggtgttggtgacaattgtcaccaattggataaagcagctcaggttgtagtgggccattaggaaactgtcggtttgctttgatttccctgggagctgttctctgtcgtgagtgtctcttgtctaaacgtccattaagctgagagtgctatgaagacaggatctagaataatcttgctcacagctgtgctctgagtgcctagcggagttccagcaaacaaaatggactcaagagagatttgattaatgaatcgtaatgaagttggggtttattgtacagtttaaaatgttagatgtttttaattttttaaataaatggaatactttttttttttttttaaagaaagcaactttactgagacaatgtagaaagaagttttgttccgtttctttaatgtggttgaagagcaatgtgtggctgaagacttttgttatgaggagctgcagattagctaggggacagctggaattatgctggcttctgataattattttaaaggggtctgaaatttgtgatggaatcagattttaacagctctcttcaatgacatagaaagttcatggaactcatgtttttaaagggctatgtaaatatatgaacattagaaaaatagcaacttgtgttacaaaaatacaaacacatgttaggaaggtactgtcatgggctaggcatggtggctcacacctgtaatcccagcattttgggaagctaagatgggtggatcacttgaggtcaggagtttgagaccagcctggccaacatggcgaaacccctctctactaaaaatacaaaaatttgccaggcgtggtggcgggtgcctgtaatcccagctacttgggaggctgaggcaagagaatcgcttgaacccaggaggcagaggttgcagtgagccgagatcgtgccattgcactccagcctgggtgacaaagcgagactccatctcaaaaaaaaaaaaaaaaaaaaaggaaagaactgtcatgtaaacataccaacatgtttaaacctgacaatggtgttatttgaaactttatattgttcttgtaagctttaactatatctctctttaaaatgcaaaataatgtcttaagattcaaagtctgtatttttaaagcatggctttggctttgcaaaataaaaaatgtgttttgtacatgaagtaggaatcgtatttcagcttcaaggttcagattgaggggcccactgtttggagaggatggtattcaggctttctcatgtccttcaaatctgttagcgtttgactctagaaatcaaagcaaaggagtggttacccagacacttcttttggtgtgatcaatgcgctgatgtgatctatgaagatgattcatgcttgaaaactagcacagaaacatcttgcttatttgccaaagctgggagatgagcttctctgcataatttaaatgttcagataaatgaagctgacttatttaagcaataaccttttaaacattttagctaagatgtataaaaatgtttccaaaatataccacatactttatttcttcttaaatgtagtacattaggttacatcatttttcttgctgtcttgggcatcaaaacaggtgccatggtaacctgacactctcaggagacattaagatagaaggggctgttcttcagtggttcccattgattctccccatatctttttgctctcaggctctggccgtctcttcctgagccttaactgtgtctgccgttagtcctcctctccactcattgcaaacattattctatatgtttggtggggacatcagctatctgcgcttgtcagaattgtctattaataggggcaatgtgttagaacctccaagtattcaattatttctggatacgtgagatcttactgtatgtaaatctcaacatttaggtacttaagtattaccttgcaaactgtacgtgatttgcttctcaggacagacagactggattttaaatgaggccagaaaaacacaatattttcaaatccttttaagacttgtggtgatgtgtgcaaattacaggcattctggagatatgtgtacagagaatgtggtctcaatgaacgcagtgtacatgctatagtctgctaggacattagtttgctggggctgccctaacaaaatactacagactgagtggcttaaacaacacatttatttctcacatttttagaggctggttaaggtgttggcagggttggtttctcctgaggcctcaaatggcttttcctctgtgagctgacgcttcttataaggacactagtcagattggattacagcccaccgaaaaggcccttttaacttaatcaccggtttaaaatcccagtctctaaatatcacaactttctgagatactgagggttgggactttgacatatgaattttaaggggacaccatccagcccctaacatctatttccctgaaggtggggcatattttcctattaaagttaacctgaaacatgtgagaatttctttgtacatactttccgcctttccaataagttatgttccaaacattcattcccatttcggcttttcaggtgcagacctcacagagagatgacagagaagggttgtggtccccagtgagacaacgcctgcctatctaacctgcacagccttgagctccagcacccacccgtgcacagccttga

SEQ ID NO: 97 - DNA, 128026 bp, Homo sapiens
  source 1..128026: mol_type = genomic DNA
ccatgaggactaggagcccagccttgcgccgcattcgcactgggggacatgggaggggtctagctggccactgctggaggcagcgctggtcgtcacctgggcggccagaggctgggatctgcgaagttgaacccagaactaggagtggggcttcccccgccttccggtgaggggagggtgaggagctggagggaggggcgggagagaggcaaggggtggacggagccaaaggccgtgcctggtggggcggacggaaaaggggtgggcatccctcctggtaccaagctgctgggtgcgaaggcagatcatatggggtcacccatgtgcaagcgtgcgccactgcaccgacacagacaagggtccagccctgtgtgtgcagctgcaactgtggcagtgaccacttctgtgaaaccagcatctggggctggagatgtcaccggcatccccagtcatggcctggcccccatttggaatcttctgcccaggggcccagcttagccaccaggacacgtgctgtaacccagatcagggccccgtgcttcgaggtgcggctgtgttgtggttggaatgagtcactctcagtgctgtgcagtgtcccgttgagtgaccgccacagttcacgtgtgtgctccaacagctaccatctcgcatttttaaaagaagtggccgatactcccacacgcactttttagccacaattttctttagtgtcaggtgcaaactggagagcaagcctgagctgaccagacaccacctgccacccactgctcacccgtcacagatggactgtgctggcagggacctgcctctggtgtggactgtggaaggagagatgctctgggcttccaggggagccgcctgctgcagcagcagcccaggccatgctgcctggcacagagctcaaggtcccaagtgcccccgctgggtgctgggctgcctgccctggcttgcagtcttctcccaggtccgcactcttctgcaggggccatcactgcccttgtcctaccaaggacaactaggtctcagtgagtggcaaatagaagccaactccctgcataactcaggaaactgactccgagcattccctcaaccagggaccactcaccctggcccagacctccccgagaactcctgcctcttcctggggcctctggcctaccccatcctgtcccttggggctgctggcagggttggcgtgtatgggtgtggacaggcagaccctcgcgggcagcctgctcctggggccctggcactgcctggctggggctcacaggcacgctgccctcctcccttcactcctgccccaaggatgccctctgttcaggctgaacaccccaacagcagccttttgggtgacctccgagtgagttacccagaatagcttctgctggcgaatagcatcttctgcaaggtggctccttcactgccttttggagctcaggcacttctggggcccagacacacgggtgacatgttaccacatccaaacggaccactgggaactttaaaactgccgtcttctgctttattgacaggtaaattgttcaaaaatgttctcacaattcaataattaattacaaagactgagacttacattaaaaaagtaaaaaccagaaccccccaggtgcccatccagcagaaggcccaggagggcagtggggtggcagggctaggcggtgctgggccactcagtgccgacttggggaagtgcacgtcctgaacagccttgccaagcagccgaccggtgggaggacaggggaagcctggcccaagctgtggacaagctgtgtctgccgccacagttaatcacaagcctctgacgacacagggccacagagctggtcactcaacatctggtacaaagggtgaggtgaaatccacgcgcaggggattgctgtgccgtgggccggggccagtgtgcaggagtgtgttgggtgggtctacgtgatcatacgggctactaatcacgggggctccatgcgggggcaggactggtgggggggggggcgggcagggcggggcggggtggggtatcccagtggctgcttcgtggcgccctggggctctgacttccctcagcccagcaggccacagggcctgcctgcaccacgacactcgctggttttatggcaggaggcagaagccgtggaagcgaatggaaaacagcacagctgacttcacagtagtagatactggtgacacttcatggctgcgacccagaatgaacttaatgcacacagggacgcagggtgtcactggtcctgggcctttgtccatgactaggtggtcagcaggacttctgcagctgactgtgcaatggctaaatgaaaaaaaggccacagactaacctccactttcctgtcttcaaaattctagtgacactgggaatgctataggacctcctactattctcttaaggtcctaggaaagtttcaggaactagggaaaagactgggtactgaggctgtgtccccagatgtctgcttccgaagcagccgcgtcatgacgggtttctgctgaggaagtggtgttggcagggccccatatgccctctcgggttgtcaggggtgggagacaggctgtatgggggtccttcatgtgcagatggaacagcatcgcctcacagctgtgcagacgaacagatgtggtctactgccacgaacaatgcggcataaaactgatcaatattataataaagatttgtcttcttcatctccatatctacaaagtgattctacatttccttggacaacactggagggcccgctcagtcttggcactgacgctggaggccatctccagctccctggcccctgtggcgagctggcggcttcaggtgtcacaggccggctgctccaggccttcgagggggagctggctcctgtggggggagttggggctcggtgggccgctggggttggagctattcgatggagttgagtgtttggtggagtccgaatcaggctgtgaacaggaagagggcagggtgagcacccgctgccctagcctggggaggcacgcgtgcccagctggatgcaaatgtttgctcagggacaactgtcgcaactgctcttctcccttcatgttatgaaaacacacacgctctacaccagcgattcgtggggcccttaggcgtgctggtgagagtcacaaattgatgtctaatcccactcaaaaataacatggtaattatcattacaaaagacagcaactctgtagtgaagaaatcagatggggccggacgcagtggctcctgcctgtaatcccagcactttgggaggccaaggtgggtggatcacacttgaggtcaggagtttgagaccagcctggccaatgtggtaacaccccatctctactgaaaacacaaaaatcaggccgggcgtggtggcttacgcctgtaatcccagcactttgggaggccaaggcaggcggatcacaaagtcaggagattgggaccatcctggctaacatggtgaaaccccgtctctactaaaaatacaaaaaattagccgggcgtggcagcatgcacctgtagtcccaactgctggggaggctgaggcaggagaatggcgtgaacccgggaggcggagcttgcagtgagccgagactgcaccactgcactccagcctgggcgacagagcgagactccgtcacaaaacaaaacaaaacaaaaaaaacaaaaatcagccgggcacagtggtgcgcacctgcaaccaagcagtcaaagtcacaaacgcgacactctttcctgagaaaagcactaggaatagaggggaacctcctcaacaaaataaaacagctaaccatacccaatggtgagagacaaaattttcccctaagatcagccacgggccgggtgcggtggctcacacctgtaatcccagcactttgggaggccaaggtgggcagatcatgaggtcaggagattgagaccatcctaacacagtgaaaccctgtctctgctaaaaatacaaaaaaaaattagcctggcatggtggtgggcacctgtagtcccagctactcgggaggctgaggcaggagaatggcgtgaacccaggaggcggagcttgcagtgagccgagatcgcatcactgcattccagcctgggctacatgtagagtgagactctgtctcaaaaaaaaaaaaaaaagaaaaaaagaaaaaagatcagcaacaaggcaaggatgcctgctttcaccactgctattcaacatggggctagaggttctaggcagagcgatcagggaagaaacagaaatgaaaaggattccaagttaggaaggaagtaaagctatctctctttgcagatgacatgattatacacgtagaaaatcccaaagaaaagaatccacaaaaaactaataagctcagcaaagttatagggtataagatcaacacacacaagtcagttgtgtttctatacaccagaaatgaacacactgaaaaggaaactgaaaaaaaaaattcaatttacaacagcatccaaaagaatagctaggaatagtttaaccagagaagggaaaaatgtgtacactataaattacaaaacattgctgaaaaaatagcttaaataaatggaacacatctcatgttcgtggagtaaaaatattgttaagatggctgtactaggccgggtatagtgcctcacgcctgtaatcccagcactttgggaggccaaggcgggcagatcacttgaggtcaggagtttgagaccagtctggccaacatggtgaaaccccgcctctactaaaaatacaaaaatcagccaggtatggtggcgggcacctgtagtcccagctacttgggagtctgaggcatgagaatcacttgatcccaggaaacaaaggttgcagtgagccaagatcgtgccactgcactctgtctcaaaaaaaaaaaaaaaaaaaagacattaattatgaggaatgtaaataacgacaacccatagaacaagagaagacatctgcacatcacatctctcacaagagcctggtactcagaacatgccaggagctcctacaacccagccacaaaaggacaaaccacccatttcaaaaatgggtaaaggccttgagtagacatttctctaaagaaggtacggaaatggccaacaagcatatgaaaagatgctaaacataagtctttagagaatgcaaatcaaaaccacaatcaggtactacttcatagccaccaggacgactattaaaaagaagaaaaacaagaacaagtattggtgaggatgtcgagatatgagaaccctcacattgctggtggaatatagaatggtacaactgctgcagaaaacaatttggtggttcctcaaaaagttaaacatagaattaccacataaatccagcaatcccactcacaggcataaacccgaatgtgaaaacaggcactcaaacacatatgtgcacacacgtgttcacagcagcaccactcacaacagctgaaggacagaaacagcccaaatgtgcctcaggggaagaatgggaaaacaaaccgtggtctagccatacaagagaatattatttagcaatagaaacgccagcactgatgcatgctacacaacgggggtgagccacaaaacagtatgccaggtgagagctaggcacaaaaggtcaaacacactgccatacgagaggctgggcattccatttccacgaaatgtccagacagggaaatcacaggaaactactggctgcccaggtgctgaggggagggagggacggggagagagtgcttaaagggcagggggtttattttgaaatgatgaaaatgtcttttttattatgttttagagacaagatctcactacactgcccaggctggccttgaactcctcaggccatccttccacctcagcttcactagtagctggtactacacacgtgaaccgtggtgcccagctagagtggaaatgtttctgaatgagaaagaggtggtgactgcatctctgtggatgtaccaaatgtcactgagtagtttaaagtaactttaaagtagttattttgggcccggtgtgctggctcacgcctgtaatctgagcactttgggaggccaaggtaggaggacagcttgagcccaggagttgggagaccagcctgggcaacaaagtgagaccctgcctctatattattatgaaaataaaaaaaacaaaaaaattgttgttttgtgaatttcacttaaatttaaaagaacaaacaaggtcatgcagacgagacaggcactggctgcctcaggacacagtaccctaagagggacaccatgtcctctgtataatgtgacagcctaagacacacttcaaatcccatgaccaggaaacagcggacaaactcaaactcaggagcgttctgtaaagtaacagcagtgcttgctacaaaaatgtgactgtcccaccagacaaagacaggctgggggcctgctgcagaataaagggtggaacagtaggatggacaaaggatggagaagacaaaggacttccagaggaagagacgctgaccttggcagaaccagcaacatgtgcaaggcatctgcccgtccgttcggcagctgatgttaaaacatctcagtgctggggctgagatgtgtggtggagagatgagcatggcccctccgcctgcatccctccctccctccctccaaggatggcgccgggggctaagccctcagctcactcctcagccctcagcactgcagctcctcgcctccctcgactgcattctcatccccattccgcacaggggaaactgaggccagagcagtgtggctgagctgcgcacaacagtggcgcttgtcctggaggtggtccccacactctgacaccaagcgccatcccaagggaggggcagacagaccaaccaatgtggaaggtcagcccagaccaaagagactgctgatgtatcacattgaagtacataaaacaacacagggagtccagaggaaagaggcaggttggcgggaaagcttccattcctcctggggcagtgtgacagccctgtccctagtcagcgttcccaaaggagcttggggtctgaccaagagattgctgcacgagcctcctgggggaggggacagccaccccgacccctgcccccgtcaccctcacaccgcaagtggggtgctccaaaagggctgtgacaccacccagggccccagatcttcgggctgcttttcctcctgcagtggtggctcatagcctcagcactggacctgggcaagtctcacctctttgtcaaagtcctggtctggatcagacatacttctcagaggcacagtcacgctaggctccgatccacctacagaacaaggacagctttcctcttagggagaaagtcaagaacggaatcaaatgcctggggtctccccattccagcaccccctaccccccacctcccccagggctgcgggggccaggcttcccctgtacctgatgagggccacgagatgtagggcttgttcctggatggaggctggcgagccaggttggtgggagcggggcccggcctttcctcctgggaggggggcacagcactctgggcagaaatagcaacacgtgagcatgcttggttgacacccggcagggccggctgcgaagtttgtgcaacctacggtggctgtggcctcgtgaccttgatgagcaaaatgggggccaagagggctctctggattggacaagggttctggacagtctggaactaagaactggcaatagcaacttcagggcaggtcaaatcctataaaaagcgtactttttttgtttgtttgtttgagactgagtcttgctctgtcccccaggctggagtgcaatgacgtgatctcggctcactgcaacctctgcctcctgggttcaagcaattctcctgcctcagcctcctgagtaggtgggattacagatgcccaccatcacacccagcttatttttgtagtttagtagagacagggtttctccatgttggccaggctggtctcaaactcctgacctcaggtgatccactcactgtggcctcccaaagtgctggaattaagaggcatgagccaccacacccagcctaaaatacataattttttttttttttgagacggagtcttgctctgtcacccaggctggagtgcagtggtgcaatctcggctcactgcaagctccgcctcccgggttcatgccattctcctgcctcagcctccccagtagctgggactacaggcacctgccgccacacccagctaatttctttttgtatttttagtagagacagggtttcaccgtgttagccaggatggtctcgatctcctgacctcgtgatccgcccgcctcggcctcccaaagtgctgggattacaggcatgagccaccacgcccagccaaaaacatacttcttaagtaaaaaagagaaagtatgctatctgttggtacgaaggtgttactgagaaatcaccacctcatggcaaacgtccttaggaagccctcacaggccgaaacgtggtggactctcacaagtacctgcagcatcactgcccagggcggcccgaggcctgtgcacaaggccttgtgacagggtaagtgctcgtgaacagagcttcagcggagacgggcttgtgtgacaggagcgccaggtcagagcacagcgccagcctcgcaggcactgcctttgggacagtctcagccagcatggctgcctgagcggggaggaggagatggggtgccctgcccgccctatcccggccgtgcacgcaccagaggcaggtccatgagcacctgcatgccgtcgcctgggcccatgtgggccacgtggttgaagttggttgggttggatatcattttggatctcaattctgggtctctaagcatctctctggggaaaggacacacttttgagattcatggatacgtgagaatcctcttggccccctccctagagcgaggcccagcaggccccgtgaggccccgctcctaccgcctctgctgcagtctctcttcctctgggaccttgaagacgaaccgccttttgctcctggtgcgcagcatctgcttcttgctgttgtcggaggtgtccggcacgttgagaaccgctcctgcagaagcagagcgcgcggtgacggtgctgcggcaccagggacacacgcccctccaacttcccttccctccactcccggtgcagaggaaggctcacccgagaacttgctcttgaagtagatcaagcgtggaggctcgcagttgaggaggttgagggtgccttcagagttcaggggccttatctggattggaaaccagggagggacagtaagcgcggccacgcacagactgcaccgggagaagcccgcccgcacaggagggcaccgaggccgccttaccctccgcaggccgatggtctgcacccactccatggtgcgcacatcaaagacgtccacgccatactcgctgtacaccgtgacgtgggtggggctgcaacctagcgcagacggagcagggcggggtgagccacagtggctcaggaactcacctgccctcgggccggaggccaagccttggcacttgaacaagtgcagaggcggcagcactgccctcagctggttcacgtcaccaaagacttcatgttcccactctggaattcatcttcatttcaaagtttaaacaaacacaatccaatgtttaaatgctccacaatcacttccgtaactaatattttgaatactacagtacagatgttgaaggtgacttttaaaaagtctggtttttcatttagctctcatgagatgtgattatcctgaaagctactaattcaggctcaacactttggaaattcaggtaggggccgactgttcagtatggtgaggctaattcttccgtaggagatggcaagtccggtttccaggtaggtattaaaaaccacacagaaaccactgctgacctctgggcaacaaccctgcctgtctgccctccacactaatgaccctagacccctaggaacccgtgctatgggggcgtgggaagcccctctgcagcccggtctgagggcatatgcaagcgaggctaagggcgtcctgcagggagctctggggtccgcgctgtgctcctcacctgctcatctgttggcttacagaagcaactccacccaaggtgccacggatgtgaaaccaaggactgcaaagcctttggccatttggagtttaaggggctttctccacgtttagaagagcagtgacacagctgtgccacacgacaagggagcggtgtgcgtcttccgctcagtccctctgtgtgggtggcacgctcactgcccccacagcccctcagcgtagcttggctcctggccatcagcttgcagaaacgcagagctgggaggcggcaagccccaaatgcaagagagctccagctcagtgctccttcctggctcttctgcctccggagttcaaggttaatcctgcatcaggacacacctcactgtctgaagatgcattttaaaagccttctgctctgtttctatcacagactccaaacaggctacaagatcaggacttttcttctgaatacaaaaagggaaatcaaacagggtttgcaagaaagacaaaagatactggcctggtcaccaaactgtctcagaaggagcatttcagatgcacctgtgaggcctctgagaaccaagtcaaaagcagccccagacactgcccttcagggaaccactctccacacgggcttctgggaaggcccttgcctgccgagtatgtggggattcgcttgcaaggaagcaggaagaagtctagtttgctgactcagtgataaacagatgcccagtgaaaagattctagtgaaacagattctagtgaaaagaacatgggctctggagcctgacagatgtgacatgtgactgatacagagcacgcggcccctgtggccttcagctgcctcctctccaacagggctgataacacctgccctaagggatggggaggggcaggggaggccacccacacagggcactagcaaagggtgcagaatgagcagttctgcatcctacaggtgatggaattacttttgaccagctctgaaactcatctgcatctgcactgtgcccgcaggagagaagacccaccaaggcggagaaccgaggaacttcaggtgtctacgccagacacgtgtggccaagattataaatacattgcactaagtgacctgggccctcttcaacgttacgctttgcaaaaatgtaaatcctgtgtggttttaaaccctgtgctggctgcctatgaagaggacagggtgttggggggtaagagtccaggacaaggggtgctgaggcagcgggactggccccttcctgcacctcaccgcaggcccacggcccagccccactgcccacacatgtctgctgtggtgtggccatcgggatggagccgggacacactgcagtaagcccgtgggtggagctggccgtgcacctcacaggcctggtgtctagccacgacgccctgggtatgatgccgtctcagcaaggctgacaatggggcagacaaaggggtttagcttcaggtaactgagggagaatgtcattccccaactcttggcctgttacccccatatgcgcggctcgtcttcctcccggcctcctcttgatctgtggatttgatggtgcaggccactctgatagatcagagggattctgaggtttaaggtttcctttctgttttaaaagacagggtctcactctgtctcccaggctagagtgtagtggtgtgatcatggctcactgcagcctccatcttctgggctcaagcaatcctcctgtctcagcctcccaagtagctgggactacaggcatgtggcaccgtgcctggctagtttgtttgtttgagacggagtcctgctctgttgcccaggctagagtgcagtggcgcgatcttggatcactacaacctctgcgtcccgggttcaagcaatcctcctgtctcagcctcctgagtagctgggactacaggcatgtggcaccgtgcctggctagtttgtttgtttgtttaagacggagtctcgctctgttgtccaggctagagtgcagtggtgcgatctcagctcactgcaacctctgtgtcctgggttcaagcgattctcctgcctcagcctcctgagtagctgggactacaggcgcccgccaccacgcccggctaatttttttttgtatttttagtagagatggggtttcaccctattagccaggatggtctcgatctcctaacctcgtgatccgccctgccttgggctcccaaagtgctgggattacaggtgtgagccatattttgttatttagtagagatgaggctggtattgaacttctgagctcaagtgagcctcctgcctcagtctcgcacagtgctgggattacaggtgtgagccaccgctctccacccggtttaaggttttaaaagcaatcggacagcgggccagtcgggaagtgtccactggtcctacctgttccccagtgccaccattcatagagaaagtcatgccaactaggcgaattcagtgacccaactgtttgaaaaacagcccctaccactttcagaaaatacttgtccttagagggactgtaacttaagacaccagaggtgaattattttctggccaccaaaacccctcaagcttgtctttactactgtgtaagtttctgtattatcacgaggaaggccttttaaatgagagatgaatgccacgccccgttctcggttcgccgagcccttctgcccaggggcctatgcccgccgacggggtcctctgctgaggcctctggaagaaccggccccatgtgctcagggagagaggttgctgagcccgcctactgctggtctgagacgtgagatctgaaccatgctctctgctgcgggctggcatggggcccacctctcccgatgctctgtgactactcaactaagggactggaagacaaaccaaagcaaaatcgaacacatgctgactgtcggtgggaaaagcagcaacagggatatgcaacagaaaacatatacatactacaggcgacaggagccgcaggccacatgagctcctgcgcgcgtgccctccggccttgcgggtccacgtacagtcccatgtggctgaagcaaagcaggtactcctcgctttcgagctccacagcacaaagggcatcaaaagactgttgtgagaggaacgcaagcgaggggtcattgggatttaccaggtttagaggctgcccgtccccctggatgctcagcaggcagaacccagaagggtagcccacacagagcctgtccctgagcaccgccaggcactgcacgctgccgggagccacaatctcattgaactttctgtggaatggcttcgttctctggatctcatagcaaaggatcagccgtttcacggccacaaacaggcaggtgccagagttcctcttgagtgtggccgtggccatgagctggcagcctttggtttccggaagcttgatgtcaaagctgccttccgctccatcaagggacgaccacggatagaggtgcacatggtggttccggccacagaggaggattacgatcttctccctgggagcaagctcgatctggtgtaccttcttacagtcagcggcacggacgatcactgtggcaaggaggacaagagcgtgaggccgacgggacagccagcagctcccaggggctgacggccttggctaaagacttgcctggaacactctggggccctcccctgggctcccttcctgtgtgcacagcctgagcccggccctgagcccgtctctgcccacagagccagtggcttgaacgccccccggagaagctgccccacatccacagcgcgctcctggggcagcctcgggggctggtccaaaggctcctctgcctctgctgctgtgcacacccctcagtgcaccagggctccagctgggcagcgcttccacctgggtcctcgcgcagcaaggccctggggtgatctgggcctccttccagctcatccccgaaccagagggccctcacgctgcacatgagggacaaagagctgtccccaacccactgggaccctgagacaaatcctctgaagacgctgccctcacagggcccccagtgaagacactgccctcacactcacacggcccccagtgaagacgccgccctcacacggcccccaggctaacccaagcccctcgcttgctcagatctccccacagagctgccagggtacggcctcgcccagcggctgccccgcccttctcgctccacggccatcacatgcagagatgctgggtctgtcgggaaaggactatggctcacatgaaatgtcgctggattccttgagggatgctcccctgggcccctgccccctgcccatggccagttccagtctcctgacgtttctgctcctagacccagggctgtggagcgggtgcatgccaggatacctttgcccttcctcgctgggaagactgaagtgtcaaaattggaagcaaagaaactaaagcttctcaagtgaagcctcagcacatgtgggaaagctgcagctgttcctcctcccagggggctttccttgaccccccacccactcccgctcagtgctccccttgaagaactcgatggatgtgatacgcaacttagcaccgcgtcgccatgcactcgatgccggtcttcacggcacgctggcccctccggcgccttcatcaagcgcatttgtcttaacccttaggagctactgaccctgtgctgtctgcagaggccaggctgggcctgtgacatcccaggctggaaacgccctgctcactcaccatctcgggtgacctctatgacatagagcccttcttctaggccgactgcaatcctgtctgcatctgtggaggggtaagtaacatacacaaagtcagtacagccgaccgtgaacaatatgggtttgaatgcgtgggtgggctcattcacagatacttttcaaccatatgtggatgagaatacagcattccagggatgtgacacttcagtatcgggggtgactttctctctacacgaactccacagggccggctgactgtgggattgagtctgcaaggatttgggtgtgtgtggggctcctggagctgaccctcaggcttagccggggccaactgtactgtccgcacaggtcatctgctttttttttgagacggagtctcggtctgtcgcccaggctggagtgcagtggtgtgatctcggctcactgtaagctctgcctcctgggttcatgctgttctcccgcctcagtctcccaagtagctgggactacaggtgcccgccaccacgcccagctatattttatttttatttttatttttttttttagcagagacagggtttcaccgtgttagccaggatggtctcaacctcctgaccttgtgatccgcccgccttggcctcccagagtgctgggattacaggcgtgagccaccgcacccggcctcgtctgcttcttaacatgcatggagaaactgtctacaaacccaaatggacctgtgaccttcatctgattttcagatgggcactgcagcgccgccggaagtgctgttgcttcagacacctgaaggacacaacctttgggacgtacccacgatggcagctgtcaggatggccttgatgagaggcagcgagctgtcgtaggcttccaagggaacatgcacgacctgattcctcagccggtttttatgaaggatggactggagtccttctagaatcccaacccacttcctcttttcattctcattttctgtcagaatgagcagcgagctggtcttagaaggtgcacctaagagagaggccgtcaccttcatgacaggaaacagaagagaagagagaagtcatcaaacgccaaagccgcacgcagctaccacggccctgctggagccacgcaccccaggagcaacgggggctgatgtgcttcccaggcagggacccctgactccacctcgctgggcgccttgcagaggctcccgcggcaggacacggaaggggcggggttctaaacagccccgtgagatcgcttcctggtcccattttcgttaattctgcttttgtcaaaactacgagtagctgcctactttaaatctgctttcttgaataatcattataaaagtagattctgaaaatgtgtccaggaaaagcagatctcaaaaacactggcccaaatcatgcctccctgtgagcagcctctgagcacgcatgctaccaaatgaccatcgttccagtaacaatgatggtaatttcctgtactgtgtatgacagggttgtttctgaatagagctgtgatttagtaaaagctaatttatagacttagttttgttatcaaaattttgctgtttataagaaaattcccagtggagggggctggagggtttctttccccaattcagtcttctaggaacgtcctaatgctacaatgtctaacactaactcagtgagggagcactcactcagtcaacaaaaacgctggctccaattggctggggggcactggagaggcaccttcatgcctaacctgccacagcgcccgcctggcagtgcacacgctgtgaggacagtggccgggacgtggactgagtggaagaggagtttcagatgtaggagaagggagggtcagtgaagaggggtgtctgggaagaagccagccaggaggctccccgagacgggcacaggctgctacttggccaggacgggacgcacaaggacctggagccaggctggaggttgagaccctagggccacactggaggtgcgctgatggctgccgcagcacaatgacatgcctagaacaatcagttttaaccatgtgctttgttaaaaagattaatgaaaaattcataccctgaatatacatggaatatctcggcgtgtagcatgaatgacatctgaggccaggactgagctcacggaaaactcgtcatctctggtaaggaagaaacattgaccccgctgggagacacgcgcacaggacccaaggccctcccacgccctgccctgccctgccctgccatgtccttccaccaccgtgttctgcagtggagggcgggtccctcgcctccccagatgtaagaaacacgggcagggccaacaaactcaagactctggcaggtgtttcagggcttagggatgccgcaagggaaaccccggagcctcatccccactgtgctggtgcctccagactatgccagttacagaagactcggtttgcacttggcacagccaggcagtccctccaacagccaagtgcagaggacaagtggggtgaggggtgtggaagtgaggggggagtgggagggagtggggggtggtggggggtgggcgtggaggtgacaggggagtggggggtgggtgtggaggtggaggggagtcgggggtggggtgggggtggaggtgagggggaagtaggggggtgggtgtggaggtgagacggggagtaggggggtggggtgggtttggaggtgaggggggtggggggtaggtgtggaggtgaggggggagggtggggtgggtggagaggtgacggggagggtggggtgggtgtggaggtgaggggagggtggggggtgggtttggagggaggtgagggggagtggggggtgggcttggaagtgagggggagtggtgggtgtggaggtgagagggagtggggtgggtgtagagatgagggggagtgggggctaggtgtggagatgagggggtggggtgggtgcggaggtggggtgggtgcagaggtgggggggtggctgtggagagggggagtggggggtgggtttggaggtgggggggtgagggagtgggggtgggtgtggaggtgaggggggagcagggggtgggtgtggaggtgagagggggagcggggtgtgggatcagtgtggaaatgctgttctgaagaggttccctaaagagtgctgagccctccgatggggcccctgacttgggctcatgccaacttttcgtctaccagtggcccttcaccaccaggccaggggcacacctgtgcacagccagggactggcgggtgccccgggggaagggacatggaaagtggagtatgctgccaggtgatgccgactcaccctcgctgtcctcagggtacccacccagcagccctgcccccaagaaccaatgctacagatggagtacccagccccggcctgagcccagagcagtcccgtgtgcaccacacaacagacggtgcacgggcacagcacagagatgacacaaaggcagtagcatggctccgtgtgcaggccccgggctgagctaggcctcttagtgatgcgtttaccttcacaacaacattccacatgccagtaacatgaccactgtcctcttctcactaacagatgagccacagatgtcaactctaagaggaagtgggaaggaggccccgcctgctcctgcagctgacactgggtggcactgagacagggtcacatagcaaacgctacggccacgcacacccacatggcccacggctccagacttcttccacacaccagcacctgctgcggtctctaaaacgcacagacggctgtgggccgcgtggcttttctctgggatatcttctgcttgttcttgggcatgtggttttcttatgttaaattaattcccctgtggcaaacttctcaacgcaaacacatgcgaggcaggaagcgtctacagcgctcccgttcctgcgcacgcaggcccgtatgcatgtctgttcatacgcatgtgagcgcctgaagtcatgactaagctgtacccatttttgcaaccatacaataatgaagcaggtgaagtactaatgaggtgaaagactactaaggaacacaccgtccttttggctaaagatagctgaggaagattcacagagcaaggacagtgctgcccaaacgcagacctgagatccaagacttggctcgcaatgacaccaggctgggtggattttccttcaggcagatcatacaggaagagcttgcagtcacagacgactgcatatgcgcgctgccatcccttcttcacccccgtgggctttgggacctatgaataaaaacaaacagtggccacgttccaccaggccaggcaggccgccaggccccattacactcgttcacaatctccttccagctgccaggctggcggcagagctgtttggacagagggatgtttgcccaagaaggctcaaggcgttgctggggaggggtccatgcgtggcagcagacggtgccagggaaagctggcagctcagccaacgctgtgtccaccccatgcagggtgctgtggtacacgcagcccgacagtctcgtagaggtgggcctggcacagtggctttcagactgagcttctgcccactggctggacactcagcccaggatggactctgagtgagcgtctgcgtggaggcctcaggatgcccaggccattcagaacagcggctgcgccgacctgatggcctcagtgcccaggagggtaagccccctaggactggcaccagggccacctgccgcagcaaggggctgctttcaagagtggctgggcatggctattggtcactgcacctcacaggcaccgagggctgagggcggagatgaagccgcctaccttgacatggcctttgtaggctgttccgatgcctcgctgcacgtccacgcccagaggcctcttggactgctcgggaggtattgggcacacctggggggcaccgtctttgcaggacacgtggcaagcaaaggaacacactggaagagagcaagaacactgccttcaaagcttgctgcctacagagaagtcactgcagaacctatgccctgaggaggcaatttaataatcaccaggtctcgcctggaatcccagcactttcggaggccgaggtgggcagaccacttgaggtcagcagtttgagaccagcctggccaacatggtgaaatcccgcctttattaaaaatacaaaaattagccaggggtggtgaagcgcacctgtaatcccagctactcgggaggctgaggcagaagaatcgcttgagcccgggaggcggaggttgcagtgagctgagaccacactattgcactccagcctgggccacagagcgagactccatctcaaaaaaacaaaataaaacaaaacaaacaaaaaataatgatcaagtctcacatcaagtccagacacccaaaaaggtaagaacagttgcaaggcagaatccacacaaaagctcagggtttctggcatgaatgcgtcttcagcatgcgcacagggaaagggcccatggcagaagcctgcttccatgctgtccctgccagcccgggccgcctcccacacgtgggagtttctacacggcaattcaggccagcggtcatggggacgtggggtcttggcagccaatcaaaatgtgcatgagttgaaataacaaaaaacaatgcttctgctataatgtagaatgaagggcatctctgttcacagacccatggtcaggaaggcgtgagtgctcagagccagtgcgagtctgggctccaggaccctcccacagcactgggtggcttggggtggttgctcatctgtgaaatggggcaatcactgagggggtaagagcatgtcgaatcccagcacagggcaagagcacaagatatagccttaaaaatatgatgggctgggcgcagtggctcacacctgtaatcccagcactttgggaggccgaggcaggtggatcacttgaggtcaggagttcgagaccagcctgggcaacatggcgaaaccccatctctactaagaacacaaaaattagccaggcatggtggcgtgggcctgtccccagctacttgggcggatgaggcaggagaatcacttgaatctgggaggcagcggttgcagtaagctgaaattgagccactgcactctagcctgggcaacagagtcaaactcttgtctcgaaaaagaaatagaaaaaaagaaaaaaaatacgaatgacgaccagaagcagagacaaataattgtggttatctttagataatttgacagtggaaggttttacacaattacttttcctctctgattttctagaacagctgcagatgatctacttcgtagtaattctcagtagatgagttgagtcaccacagaggcgcacagcacaatggagcccccagcacagcagggatccacggttccacagacctttactgaggatttgtaaaaataaacctgccaggctgggtgcagtggctcatgcctgtaattccagcacttcgggaggctaaggcgggagatcacttgagtcccagagtttgagaccggtctgggaaacaaagtgagatccctcaactctctacaaaaaaaatttaaaaatagccaggcatgctggtggtgtgtgtgtctgaggtctcaactacttgagaggctgagacaagggaatcgcttgagctgaactgtgattgcaccactgcactgaagtctgagtgacagagtgagaccctatctccccactccccctaaaaaaaaccctgtcctcaaatcatgccaatgacatttcactttagtttggtttgcttgcatcagggctgccctggagccggctggtgcccttagctgcaggggtgtggggctgtgcacgctgaccccaggagctgcaacgacactcaccctcgcaggcgtagccctgccggatcagcccaaccatcagggaggtgcagtggctgcactgagtagggctggagaaggacttgatgctgaactggtgagcttttggctggaaggagaaaatcaagaacactgaggtgaaccatggactcttgagagtcagatccatctgcctgtgatccagtttatacacagcttgggcattatcctgaaaaggtggaaatgtgcaagttctggtcttggtctacgtgttccctaacagggctcatcaaatagtggtgaaaaccacctacgagcctgagccagagagaggccaacaaatacttccttcagtgggagagcactgctaccaaaaagcgaggtcagctgggccagagggccgaggtggcatggccagtgctctttctggctcatgctcctggcctcctggagaccagcaccaactggctcttgggggccgacctggggccacatttaggttgggctgcacacaggccttgcatgtgtccaagagacacccaagaatcaccgacaggaggacagttcataacagcaaacgcctggaaaggctcacggtccctcatcaggagtggacacattgtgaacccagcggcaactgcagcagccccaaggctgaacagagggtcgtggtgcaggccatgcgggaccgcctgtttaccaagctcaggcgcagcagagaccaatacgatcctcagcaggaaacagatgtgggtgagaccacttgcaagaagtaggggagtgaccgacacaaactccagagagctgtgggggaagaggctggctgaggtgggcagggaggccgtggggcggtggccgggccatcaggactaggagtgacacaccagcactctgcagagttgctatcaaatatggtaaccaaataaacgacctcgcgacttggtccctgactctgcaagagtcttagtccaaaagccaaacccttaggtagcctcatagaagtttggcttcttacgtccagccggcatagctgcctgtggcaggaagcacaggcagaggccgtgtctacattaacaacaacaaaaaccaccttaggccacagggctacgtactcgcaatgcttggaactcaggggcccgtcaccctggagactttctgatctgcgttgatgtttatatgaaagaaaaggggatgttacagaagaagccgaggccaggacaggggagcaggggcccagtggggccgctgtgctggctctccaggatgcacttgtggaaaggatgaggctcagaaccgcacatgcactgcagggccgtttatgctgggagtcattctcacccaccagccacatggttctgtaaggttctctaagtgcaggcagacaaatgaaaatcaatgtggagaagtaagctgcctacctgtggagaggggaatatggcttggggaatgagagaaggagagtggggagactgaatgctgaacttttccaattaaaatatatttgtgtagcactggtatcattaagaaaacacagggtcctgacagcttcctgaattacacaccattctcaacaactttcctacagaacatgagggtcgctactgtgtgtatgcaaaaatgactaagtatgttttatttatacaaaacttattttctaaataactgagaataaataaacaactaaataactaagaaggcgccccgggtgaaagcaaggcccctaccttcggtccagccagagccagggcctgcgtggtgggcaacggcacagcggatggcctctgcgggggccgagccatgtcctgggagacaagcaggacaggtgagtgtcggcccagctcagcatggctgagacacctggccctacggggtgcacttctctcaagaatgtgttaacagtgaacagttctgcatttttaatttgctacaatgttgagacatctgcggaagcctccctcatctaggggagggactgacagttaattctcaaaatgaaaggtgggcttgagcacctgggcagaggccctcgctgcaaactgttatgcaggggccaggtgagcagcatctggtcacctggacacgagggcagaccccaggtgggagcatcaccagggcaacgctgtctcacctcctgctgctctgatgcagccacagacatcgacggggacgcttctggcttcggagcttgtgtttcttgctcactagctgagctggtctgtgagaaccaagaaagaaagagtggggtgaaaggacatattctacatgatccagactctacttacaagttctttactaataaaagcagattctgtctagcccagaagtcccagcggttcttactcctggatcctatcaccccttgggtctcctcacagacccctgctccactcccagctggccggcctgccctgaggacccctgcacttggcttcctcagctgagtggtgattgcgtgggcaggtggagtctgacaagtcacagtcaccccgctgaggtgagaatttgcctggagacacctctaatgcacagccctgagcatacccgccccctcctgcagcctccttgccccggtcactgaaagggcaagacctggaaatgctgatccttcctgacctttattcataagtaatgttatctaagcctagcagccttaagatcaattagccaggccaggcacggtggctcacgcctgtaatcccagcaatttgggaggctgaggggggcagaccacctgaagtcaggattttgagaccagcctggccaacatggcgaaaccccgtctctactaaaaatacaaaaattagccgggtgtgctagcacacacccataatcccagctactctggaggctgaggcacgacaatcgcttgaacccaggagaaggttgcagtgagccgagatcaagtcattgcactccagcctgggcaacaaatcaagactgtctcaaaagaaaaagagaaagaagaaaagatcaaatagccaaatgcttcttaacctcatttcaaggatcaagaagaaattcgaacatcaacagaggtcggtgggcccatgagtagatttaagaatttccttgaaaattttatgacacagggaagcaatgttttgttttaacaaattaagagttctaatttcacagtgatttatttgaagctaaagctacactctgaaaccacttaaaaacaactctatttcaacaagtattcctgaaactaatagtttatcatcacaggccactgctgtttacagacgcacatgtaggtatgctgagtagcaagtgttagcaccagcaagcagtgtgatgggacacagacatggctgggtaggcgcctaaagcattgacagctgtattttgtgttccacatcagaatcccaatgaaccaaatcagataaacactttccaacagttgcaattaattaggccactgaggaaggagccaaattcagatgggatggcagcatacacacataaaacacacacacaactgtgtactgcaaattcacaagggaaaggctagctcgactggctaattaccaaagctcaaaaatgtaagcaaatctgccccataaacaaggtatgttaagtgttacggttccatctttagataaatgagaaaaagaatattaattttaggcatgtaaaagccccactcgtttcatttagttggttaattaatcaaagggatgcagattcaggaacaggaacattgaggaggctgtgcactaacaggagtgaaagctgcgggaagccagcgctggcagccacttacttcttcccaaaaggctagcagggaagatgcagacgaggaggagagagagtccttggaggtaacagacaggaggaacaaacatcatttcccacccagtcaacactggcatgaagatatattgacttaatcttggtgacaaactgtttctagtaaaaaccaacatgtttcatgcaggcagcgtgggataagaagtttctcaaagacaattttcaaaagagtctggaagctctaacagacccagcccctgatggagggttttttctgttcaacaataaatgccttcccatttaaatcacagagggattagcggccaggcacggtggctcatgcctataatcccagcactttgggaggccaaggcgggcagatcacctgaggttaggagtttgagaccggtctgggcaatatagcaagaatccatctctacaaaaatttaaaaattagctgggtgcggtggcgagcacctgtagtgccagctactcaggaggctgaggcaggagaatcgcttgagcccaggagtttgaggttgcagtgagctatgatggtggcacggcactccagcctgggcagcagaaggaagccctgactctaaaaaatggttaagatggtaagttttatgttatgtgtgcttatatcacaatttataaatcaattatgggccaggcatggtggctcacacctgtaatcccagcactttgggaggctgaggtgggtggatcacctgaggtcagaagttcaagaccatcctgggcgacatggtgaaaccccatctctactaaaaatacaaaaaaaaaaaaaaaaaaaaaaaaaaattagccgggcatagtggcgcgtgcctgtagtcccagctacttgggatgctgaggcacaagaattgcttgaacctgggaggtggaggttgtggtgagccgaaactgcaccactgcactccagcctgggtgacagagtaagactgtctcaaaaaaaaaaaaaaaaaaaaaaaaagggagggatgagggattagcaagggcaggcgtgctggctgtagagaatgaggcatgaagatgccgcctctgtctccatctctgctgcccactctccacagctgtgactcacacactcatggacagtactggctgtaaactcacttgctaccgggccctctactctgttaatgttacagaaagctaccgctttcctggccgcctccattcagtgatcaagcaccatctctggttctctggaatccacttattcctccccacagcagtgcccggctccgcagcaacgagagaggcaatgacttgtgcagaaacaggcttatcaaagatctggcgggcacttaccggttaaatagatttgcttcttcaaaactgtggatttcagggaaaagacaagcattgccagtttgataaaacaaacaaacattttgacaggtgaaggtgaacaggtgtgcgtccagagtggctgtgagcaatgcaagcctgcttgggtgttgtaatgacagacacaggccaggatgctaagagtccaccccaagggaggctgctacgggcagatgcccacatgggcacctgctgactgccccctactcacacaggcagcaaccctagccaaccccacctcaacccaacgatcagacttggcatcacccaccctgggcaggccggcctctgtgcgtggaaagggcacagctcctcctgaggagagtttgtgccaaaggttcaacccacaactgatgaagatgaaacatcagacaaacccagagtggacattctgcaggacaactggcctgggtaacaccaaaatatcattgtcataaaagggaacagatggggaactgttccagattaaaggaaacaaaagactaaatgcgattcatgacctccagatggatccagaactaggaggaaaagccagcaggaaagggcattcctgggacgacaagggacacatggatatgggctgtcccacggcatcagcacagaatgcctgatgacagtgacactgtggttatgtgagagaatgccccaatcgtaggaaataactgctgaagtatgttggggtcgctgataccttcaagtcgctttcaaatacttcagaggaagaaagtctcttatgttgagagagagaaagcagatgtagcaaaaccccaggtgagggacatgtacacatgcaccctattcttcccactcgcctgcagggctggagttttctaaatcaaaggctggaaccaccttccccaccctgcaccccatcaggagttccattagtgagctccactctccctgctccaatatgctttgcgtgctgctatcaagggtgcatccctacaggtttcaaagaggaggaaaggctgtcctgcctccacggaatgccaccaagaacctgcggcccatggagggaggcagtggggtctgctcctcactcgacagctaattcccaagtagatgaccagcggctccgactgcctgagggggttggcctccttgtgagggtctcggcaaggcacctggtgccagactgttcccatcaaccacctttcccatcgatccccaatgccgaactctacagctacacagatggaaacacaactaaagtatttttattcgctctagtgtgggatttttttttttaagagatagggtctcgctatattgcccaggctcgtcttgaactcctgggctcaagtgatcctcccacttcagcctcccaaagtgctgggattacaggcgtgagccactgcacccatcccagtgtgagaatttgtattattttcttgaaataatcgctacaggctgggcgtggtggctcacgcctgtaatcccagcactctgggaggccaaggtgggtggatcacctgaggtcaggagttcgagaccagcctcgccaatatggtgaaaccctgtctctactaaaaatacaaaaattagccgggcgtggtggtgggtgcctgtagtcccagctacttgggaggctgaggcaggagaatcacttgaacccgggaggcagaagttgcagtgagccaagatcatgccactgcactccagcctgggtgacagagcaagactccgtctcaaaaaaaaaaaaaaaaatactcactacacagctgaggccagtgcagatttctccctgaagaggctgagcactttcttaatctcatctctacttaatctgagttgagaaagcttctctgggagcacctcaaataccctaaatgtctgtcacctgatgcgtttaatgtgggttgattacatgtgggtcaattacacagttagcacaacgctgagataaacactgaatgtatatttactggtgtgtttgtggccccatgagtggtaaaatcatatatgacactatttctaacttatcataaactcatctgtcacttaaaaaaaaaacaatgacttactctaaatgtcaggtcatgtgcaagaggagcagtgttgaaatactcaaaaatggaatcctgaaaatctggaagtttgagccctgcaaaaagaaacaaagaatagtcaaggcaaaaaaactaaagtctacatattattttcagacagactcagtgtcttcaagatgtcaattctccttgagtaactgatacatctgacatgatcacaattaaaaaaaaaaaaaaaaaaaaaaggggtcaggcttttccccagagagtaacaagaatcaaaaagttcacttgaaaaagtaaccaagggactgggtgcggtggctcacgcctgtaatcccaacactttgggaggccgaggtgggcggatcacctgaggtcaggagttaaagaccagcctggccaacatggtgaaatcccatctctgctaaaaatacaaaaattagctgtgcatggtggtatgtgcctgaaatcccagctactcgggaggctgaggcaggagaatctcgagcccaggaggcagaggttgtggtaagccaagatcatgccactgtactccagcctgggcgacagagcaagactctatctcaaaaaaaaacaaaaacaaaaaacaaaacccctcaaaaccacaggggcagctgggctgggcgtaggtggaggaggagcagatctaccagatattaaagcagattcactaaggcctctacaataagaatcatggccaggcacagtggttcacacctgtcatcccagcactttgggaggccaaggtcggaggactgcttgaggccatgagtttgagaccagcctgggcaacacagagagaccccatctccataaaaattaaataaataaaattagctgtgcatggtggcatgtgcctgtggtcctagctacttgggagacagagacaggaggatcacttgagctggggagattgaggctgcacgtgccactgcattcctgcctgggtgacagagtgagaccctgtcacacacacaaaaaaacacatatcaaaaaacaagaatcaagtggttcttccccatgaacaatggaacaggggagaagatccagaaacagacccaagcccatggtgatcctgtacatgacaacagtcatacataaaaccagcaggaaaaatagcttaataactggtattggacaaccagctagccattagcaaaagataaaactggatacactcctcgaaccgtatgtcagagcaaatttcaaatggatcagtattctaatttaaaaaatgaggctgggcacggtggctcacgcctgtaatcctagcactttgggagacacggcagtcagattgcttgagtccaggagttcaagaccagcctgggaaatacggcacaaccccatctctaaaaataaataaataaataaataaatagccaggtgtggtggcacgtgcctgtagtcccagctactcagggggctgaggtgggaggatcacttgagcccagaaagttgaggctgcagtgaaccctgatcgtgctactgcactccagcctgggcaacagagcaagaccctgaatcaatcaatcaatcaatcaatcaatcaatcaatcaatcatgaagccacacaagtatgagaagcatgagggaatccctccaacaactgggagttaggtgtattttcctatttatgactcaaaaaaggaagaagactgaaaacttgacacacaaaaaattttgaaaaccacctttttttttttttcttgacagacggaatctggctctgtcacccaggctggagtgcagtggcgagatctcagctcactgcaacctctgcctcccaggttcaagcgattctcctgcctcagcctcctgagtagctgggactataggcatgccccaccacgcccagctaatttttgtatttttagtagagatggcaaaaccccccccacttttttttaagacagcgttttgctcttgttgcccaagctggagtgcaatggtgcaatctcggctcaccgcaacctctgcctcccgggttgaggttcaagttcaaacaatactcctgcctcagcctcctgagtagctgggattacaggcatgcaccaccacgcccagctaattttgtatttttacaagagatggggtttctccatgttggtcaggctggtctcgaactccagacctcaggtgatccgcccacctcagcctcccgaagtgttgggattacaggcgtgagccaccgcaccggctgcaaaaccacttttatttggcaaaaaaataaataaatgataagcaaagacaaactaggaaaaatacttgcaacttacatcacaaacaaaaggcactaatccccaaaatgcaaaaggcttttagaaatccgcaagactaacaacctgaatttttaaaagcgggcaaacaataaaaacatataatgcacaaaatacaaaagtccctcaaacatataaaaagatgctcaatcttacttatgagaaatatgcaagttaaacctctacggagatgctatttctcacctattcagagcggcaaaaatccaaaagtctgaaatcctactttgtgggtaggctgtggggcagaaacccctcatgcaaagtgggaggaacgtcactgcacagcctctggaggcctgtccgtcagcatgcagcaagagtgtacaggcatgtttgccctttgccctggcaatcccacttctagaactctatcccgaaatacaccgacaaaaacaggaaatgttctatccatacagccactcctggcagcactttctgtgacagcaaatgccagggaataaaccatcccagtggctggccagcccacggcagcgcacagtgcagctgcagaggaggccggggtggcccctccagcacaaaatgatgccttttgtgttatcaggggatacaaatgtgtgcctagatttgtgtggatttgccatatgctttcaagatgaaaggaaggataggctgggcacggtggctcacacctgtaattccagcactttgggaggctgaggtgggtggattgcctgaggtcaggagttgcagaccagcctggccaacgtggcaaaaccccatctctactaaaaatacaaaaattagccaggggtggtggtggtgtgcacctgcaatcccagctacttgcgaggctgaggcgggagaatccttgaacccaggatgcagaggttgcagtgagccgagattgtgccattgcactccagcctgggtgacacagcgagactgtctcaaaaaaaaaggaaggataaaccaaaaacaatggctacctttggggaaaatatatttgaagatgttgtttgaaaatgctgattttggaaaatactgaatttggaattctgtaggtgcttctaaagtaactattaagtcgaaaagaaaataaaaacattcatttgaaaaatacttatattcaaataatgcagaatcgcacaacattaatttaccagtatctgctctgaatttttcttccatctttttcttcaaaatttccatttcttctaataattctctgtttttggcttcggaatcctttagtttgctaaaataaaaaataaatggctttaagtgcactgagaagaggttgtctgtgagctggtatggggcaggtcaggatgagagagccgggatttctccccagcactcaggactgtccagaacacggtagctcatgctgggcctttctactgcaaacaccatgaacagtacgaatatttcaaatataaacattcaaacaggaatttaaaaagtcatggcttaggaaggcgtgtctcatgaaggcctaatggagctcttgaccttcctaatcttgttcccaggcgagtcctctgttcttcagggacacagggcccaggccgctcagccgtcagccccatcaatatctttcccataactggcaagatggtggctgcaccaagaagcaccagcaccacccgcacgggtagccttgcaattccagcaacttcgtgcaggggacagaggaagtcaggctgccacggggaacacctggccgggagggatgcagtttgtgggggctggtccactcatcagtggggtgacagtgggcaaatcacctgcggagtgtgtgtaagtgggagtaacaagactgcctaccctgttgggctgtgggagggtcacaggatttaacaacagaacagtcttacagcaattcccagtataaagaaagtcaatttaactgaaacctattaccattaattttttagccccaaactaacaggatttgggacttggtaattctgttagagacactgtcccttccaggtcctcgcctgcctcatggcacagcagagctggcctggtttttatgaaactgacgttcattatcgtatcctcgtaaaaccagatctgcaaagaggagactctcagcaaatactgactgaatcactgctgtgtgaaaatggcgttctcgttactgcttggagttagggaaaaatttcaagtgagaatgccatcttcaacctctgttttaaaatattcacgttagcttgaaaggaacaatcttgaattagtgaatggagcggcacggaggtgactaagcagtgagaggggctcctgtcagacagcggtgtgagtctcgctacccagcgtgggggcacaagcacccgctgccgtcaaaacacggctcgcaccgcaccacacccccccgcggcaggcaaggccctgcaccctcgcggccacctcagtgccagaacggcctgctattcggggctcctgcaggtgaacccgacgtgctgcctcctaaggctccagcaaacgccgtggccccgattttccaggcgaggagcatcggagcccgtgaggctcagggcgggctcgaggccacacagccactgctcctacctggagtcagaccctggcaccaagtacctttccaaggtgaggttggcgtccttgaccttcctgagctcctcctggacaagctgcttggcccggatctccgcctccagggccgactgcagctccagccgcgcggacatgtccagcttctggctgcggcgcaccttccacagcgggtccttgagacacggtcatggcgttaaaaatgcattttcagttatccgcttgttaaactaatgttaacaaataagttatctttgtctaaccttaagccattacggtctcatttagatattaactctaaattatggaggtgcctcaggagttttagttttgatattttatgactttttttactcttcctcagaaatcttctaaaaaataactaaataatttactttatcttttagaagaataaaagtgattctgtagtgcaatttcttttcttttcttttctttttttttttgtttgagatgtagtttcgctcttgttgcctaggctggagtgcaatggcgtgatctcagcttaccgcgacctccgcctcttgggttcaagcgattttcctgtctcagcctctccagtagccagtagctgggattacaggtgccgcaccaccatgcctggctaatttttgtatttttagtagagacagggtttcaccacgttggccaggctagtctccaactcctgctctcgtgatccaccccccttggcctcccaaagtgctgggattacaggcatgagccgctgcgcctggcctctgtaatgcaatttctatatgggtccactggaccctggacccttttacaaacctaaggtacattatagggttcggttatctttttctcataacttgaaacgttttgctatttcaccatcctgggaattatgtcattactcattcctacctgtgattaaaaaaaaaaaaaaaaaaaaaagactaaaataataagggaagaatgacagagtgacctaggatgaagcaacagtggaataagccagttcactaacatcatcctcctgttttcttactgagttgcccaatgtatgacatcaactttcgagaggtatcaaagaagtccagagatgccatcttgctgttttttcttttttaaaacaaactgaaaacctttcattgaacacaattgagaatgcttcattttccatctataacagtaaagagaagaaaatggacagaggaaggccaggtgtgggggctcatgcctgtaatcccagcactttgggaggccgaagcgggcagatcacctgaggtcaggggtttgagaccagcctggccaacatggtggaaacccgtctctactaaaatacaaaaatgagccaggtgtagcggcacacgcctgtaatcccagctactcgggggggctgaggcaggagaatcacttgaagccgggaggcggaggttgcagtaagccgagatcacgccactgcactctagcctgggcaacagagtgagactgtcgcgggaggaaaaaaataaaatacacacatcactaaatgaaccaatgaaattaataaaagcaagctctctgagggcagaatccagtcttaacttgacaccacggagctcagtgctcagtaattatttgctaaacgaatgaatgctgtcgagagaagccatgatgatctgagagctggcaaatgttggcgttccttaaattggggaactggttacacagaagtctcttgcatcactgtaattccctaaatagtacttatatgtcacatttatacttaaaaccattagcgaattattcagtaatagaaatgcaggcattacacaaaacctaccagtgttcttgaccccagactagaactcctcaaagcctcgagctcttcggtcatcttggaagcaagagcttgaaggtaaccccgggcatctttctcgtcactgaccctggaggagggaacagatgttctatctcacgaagcatggctatcagggagaagccaaacaagaaggggacgttcccgccttcctcggcacacagtgacacagtgtcacgtcagctagagtgcccgcagtgtacccgttgtatacacgggatctcattgatggatgcgtcgttacattgcacatgactgcagtttaaaaagacaccaaacttccaagactcaagaatgaaaaaattctattactccataaatatatatacctactacgcacccacaaaaattaaaaataaaaactctttttttaattacaacttcacaccttaggagcggagggccaggtcccagctcgctccaagtctccctgctgcttctgcagccgctttgggagggctctgcctcccctgtctctgagaacgcaaggggtgtgaacggtttgccccaagtccttcagtgggttggtgggggcgtatctccacctctattccaacagaaccactgccccagacatgagaagttctggggaacagcagtgagacctgcaccccagcctgagaggcacggcctggcgtggagcacaggatcaggcagaagaggcggggcagaccccatggactgagcagggagcggattcacggccgctaatggggccgcgcacgtaccactgaatgatttccgcaatctgagcttcccagtgggccactgactccttcttggctgccagatcctgcagctcatcctccagctgtctattttgagctgtgagtttatccacaaaggaacagagctgaaatgaaacaatttcaccacagaacttgttaatcgggcatcctttaagtatgctggatttaacactggaagttcttttgaagactctgaaagttttctttaatcgtcatgagatttttccaaactaagttcatgatatggatttttttcactgtatctagcttaagtcacatttcaattcaaatctaaacctaaactgatggagctggagctagtgacttcaggcaattggcatcttttcgctgaatacaaacatcctatttaaaagaccaaacacatgactccattcaaaaattaaaacagtcacgtgtagtgaaacagcaagaacacggtctgagaaacgtgtccttgcacacacagcgtgaatgcactcacgcaagcctagacggtgcggctgccgcacaccaggccctgtggtacagcctgtcaattccaggccccaagcctgcataccatgttgctgtgcgggacgctgccggcggctgtagcacaatgctaagtatctgtgtatctcaacacagaagaggtagagtaaagtacagtattatgatcgtacgggacgcctgttgtacacacagtctatcattgatggaagcatcgttatatggcacattactgcactgtaaaaagacaccaaacttcggccggcgcagtggctcatgcctgtaatcccagcactttgggaggctgaggtgggtggatcatgaggtcaggagattgagaccatcctggctaacacggtgaaaacccgtctctactaaaaatacaaaaacttagccaggcgtggtggcagacgcctgtagtcccagccacttgggaggctgaggtgggagaatggcatgaacctgggaggcagaggttgcagtgagccaagatcgcgtcactgcactccagcctgagcgacagagcgagactccatctcaaaaaaaaaaaaccaaacttccaagactcaagaatgacgacattctactcccccataaatatatatacctactatgtacccacacaaattaaaaataatttttttttaaattacaacttccacacaaagtgctaactcaggtactttgaattaattaccttttcattttcagcagttagcttcttgttttcatcaaacagcatcgctctttctcgttcgtatttatcttttattgtacctactgcctcctccatctcgttatgcctgccaaggtgagcgagaaacagttttaaaagctcgtaacttcactgatattcgtatctatggcgtgggtatcagcttgcatcttctgaactgagaagctcatgaaaacctaccgttctcgctttgacttttctaacttatcttttaacatcaagatttctttctgcagggccagctggtggctttctgaatcatgcacctccttcttcacatttttcacttctagcacatgggaggcctcacgtctgaccaattcctcttcataaaataagactttcttctccagctcggatttgattttggaaatctcttgctggtgctctaaggtggcacccgctccccggcctccttgcttcacctgaagacaaaggttaacataaattgacaaacctctgtgtcctcaagggtcacactgtcctttcaacccctttcatcccaagcaagtgcagacaccttcccaaggactgtgtgtgcctggtctacaccagatgacgtagctgacctggctaacgtgatccaggttctagggggtcacagcaggagacggccttgcagggggatgtgcccaggtctgcctgggacccccgaagctctgccccacaccctgttcattcatgcttgcagcattcttctgagggctgactctgtgctgggccccctccttgtgactggggtgacactgaggtctctgctctcttggggctggcgggaactgacagcaaaccagtaaaggggcagaggggccgtgcaccccagccaggttgtagggagtggagggcgtgccaggatggctggggcggcttctgtaaggtgctggcctattaagtgaggtgtcaggctaggggcaaagaacaagggcacaggctggagtgaggtgggacgtgttggcagtgtttgcagcatgcagagaggccagtgtgtctggtgtggcggggcaaggaggggcaggagaggcactgctgggctggagcaggcaggagggtagctgctggacagctgcggagccacggaggccctgccgcacaggaatgtgatccggctttggtctgccaagctcactctgcctgctgtgcagagaggagactcaagggctgagaaaggggcaggagcctcgggcaccacatgccgaggtccagccaagcccgctgccagggaggaacagcatctcaggcccacgtcccagaggaagagttgccagatcactgaggcgaagggagagggcagacccatcgcacgcggctcacacatgaggagatccaggccacgccatactgccaaggagatccgcctccggccccttgcccacttggccactgtggccttccccactcccgccctccgcggcctccctgctaccctccagccccaccagtgggccccgactgatggccagcctgtctcttccccagtcagcagcaggctacgggctttaaggagcttttccaaaactcaactgcaccgaatttagaataccacgatgtgaagaaggctatgaattgatggggctggagtaggaaatgagccaattagatattcgtttcctaggacttactgtgaattgcctgaaacttttatataacaaaggaaaaacatgaacttggcctttaaaaatgaaagcagtcacgaaggcaggggtcacaccccccacctctccacatgtgggtcttgtctgaacagcctcgggtgacactcggcccggaccacacattacacaaggtgacttccatgtggtggcgtcagcaaagataagcatccctctcagttaagggcagagacccccgcccagcactaccttgagggcctccagctcgctttccatttgcttgcagaagttctcgctgtgctcacgaagcttgcgctccttggaggcctcagcaacagcatcatcaagctgagcttccagctacaaaaggaagatccagtttctattaacaaaaagcgagccctgcttcaccagttacagcagcacccacgggacctccacaagaacaagacctcgaaggagctctgcgcgtgttcacccttcatcaaatcttatcacaaattaaagtttgagaaatacacttctgggttcaactgggatggttggttactaataaaacaaggttcaattctagcttaaattgacacttaaatttcaagaaaggatacatttcttgaaatttaaatttcactgattcgtgaaaaccagtacttttgatatctgtagaacttgaattcatttattaaatgggccatttcaaacacgcacacgaagaacgagcagaatagcgaacacacgtgccggcacccagcttcaacagtgagctcccgagccaagcccgcttcatctctgcctgtgcccaaaccactcgagggcaatcccaggcactgttatcacttcccccatatgtggaatgctaattcctcattaggggtatcactaacttcagttttaactgcctgtaactacaaatatatttgggttgcaaaatagactaagaagaaaacaaacaggtcctctggggctaaagaacaaagagccctgaacttgaaaggaacaggagcatgtgcttccaggccttctcatttatgggatttatcaaggaaattttaatagagttctaaactaagcatcgcttacaatatgtcaaccattcacagcagaacactcagaacacccagggcggcacagggctgcaaaccctggggtcctgagacatcaggggtgtgcaaggcccttcctttcctaattagctatctgtgggggccaggatttcttcatgtactttatccagaacggtgtagcaaaacggattgaagaaacagccatgagaactcaactgttttccattcagccagatattaaagaacagctaacaaaatgtaaaaaatgccattcttcctgccaaatttttaaagaaatagttacttttcattaaacatgttacttatgttaacatgaaatgggttttcattgtattaacaagattttgttttaatttctgccatggtgcatgttgagagctgtagcctacataagaaagctctttggggttgtaatcattccaacagtgtcgaatggtgctgagccaagacacttcagaagcactcacctaagcggcggcctgaagtgtgctgaagggttttgccatgttgctcaggctggtctcaaactcctaaactcaacgatccatctatcttggcgcctcccacagtgttgggattccaggcgtgagccccgtgcccggcccgtgatttgcctttctactgccacctgccctgtgtggactgcaggtgtcttattcacataagccaggctgcatcacagcacagcataaacaccctctatttacttaaaagggaattaaagaaaatcagcaccacaagaaccttattgtaatttcaccaatattgaggaatgagaacaacaaaataaatgctcggccgatcaacttacttggctccacagaaaatttctgaccccttttacagtaatgcagcccaagatttcaaagacgttttataaaagtcacacaaatgtccagtcgataccatccctgaaccatctccacagctacctctttcctgagcttctcagctctccgcatttcctgccgcatggcgtccaccttctgcgtggccacctccatctcctcctccttgtctcgcagctgccgggacaccttctgcttctgggcacggagctctgccatgcgctcgttcagctccgagaactcctgcagggccagctttcgctgctgatgggcatctttgagttccttggcctgggatttcaaccgctctgaggcttcaaccagttgctgaacaaaaacaattatagatgttttacgtttgcctaacaaaggcttggaaggctggaggttcggtcttccatgatattgaggagttaaaagcgacagccaatgctggttacagattagagccacagatctgagctgcttggaaaaagacctgtgctctgtctcgtgccagccacacaggcaatgggaaggccgcctgggctcaggtgctgagaccaactgcacaccaagaaaggccccacaggccgggcacagtggctcacacctgtaaccccagcacttttggaggccaaggtgggcgggtcacctgaggtcaggagatcgagaccatcctggctaacacagtgaaaccccgtctctattaaaaatacaaaaaaattagctgggcgtggtggtgggtgcctgtagtcccagctacttgggaagctgaggcaggagaacggtgtgaacctgggaggcagaggttgcagtgagccgagattgtgccactgcactccaggctgggcgacagagcaagactctgcctcaaaaaaaaaaaaaaaaaaaaaaaaaaaaaaaaaaaaaaaaaaaaaaaaaaaaaaaagccccacaaccacatgggggcagcgtgcttacaggaggacgctccgtaatgtcagcctctgcccagtgtcacctgcacagccgcaaagctgaatgaagcatttgggcactcaatctagttacttaaacataagcaaaatcaaaaagaacacatatgacacaaagtgctgaaggtgaagtcacagtgaagaactgtataaaaacaatcgctggacagcctgcccttcaatgcagactgatgtgcggatactggctgtcactctgcactcaccacgctgatgaccctgacctccctgcagccaatctggtcaactatctggcagttcagtcactgtcacacctgctggtctgagatggaagtgacaagaccctgagcaagctggcagggcagctcccacacgtgaaggggaggcctccccaggcctctctgggcccgctgggaggtactatgaccctgtcaagcaatgagatgccatgtgccccacactgcacttctagacaaatcactcacgtggatgacccacagattatcttaagaaacaatctgggtttgatacctggcacattttagagaacagatcacaaactacaggttcaagaataacatgtatcaatgaatgtattttagaaaacacgcatataattgtgttagtaacatgctgacacctgagcataaaagtttcccatatattactaaaaatgaaatttataaacgaattatggggggaaatcacccagattttaacacagggtctctgctgcagttccctgtcattactaagggtccccttctaagagcagaggcctggtggagagaaggggagggcctggctcgggacgcagcgtgtgttgccacagccaccatgccctatgcacagccaccatgccctgtggacggccaccatgccctgtgcacggccaccatgccctatcgacatctttcctcgctttagaatgcagtggggtgctgctttctctgtgggtctgaagtggagactggagaggctgattgcgaggtggataaccgctgggggcaagggggtggaaggcacctgccactgggagccaagctctgccagccgacgcgggggctgtgcagcaggcaggcgtggcaggggccccggggccaggcttggccctggcgtcctgcatgcagcagggacagcccatgggcaggagtcccaagaggtcttccatcatcggcatgaacgtgaccttacagaattctgcaaagtcccgtaagcctttctcaccccaaactgagccacctaccttgtgcagctcctccttctcctgccggaccacgcggtgctgcttctccagcccccgcagccgctgcgtggagtcctcacgctcttggcgaagcgccactgtgtcctcaagctgtcgctcgagcctgtttgaatctggacaaaagaggaaataaactctgttcctttatgtgcaatgactatatgtaaactttatgttagctgacttactgacaggaaattatttaataattcacaacactttttcattcagaggtttttttacttacacacacacacacacacacacacacacacacacacacagtgtcataggcacagctacctgcatgcctgtgctgaacaggctccctagactttactctgatctgacagcgatctcccctgagcactgggagcccttgggtggcgcacacactcgtctgctcagtccctctaacctgtgtcacccagcacagtgcctggcccttgtcctttctcagcgtgcaagaaaagttttagttagtaagtgactcaatcaaagaagtctgtttttggatcaggacagtggggttcctgataggaaatgcagagaaggtgagattcaaagtgtgctttggaggtgaaggtcaactgcagagccaacctgtgtgaggttaaggcttaaaagtgattggagccaggccaggcgcagcggctcacgcctgtaatcccagcacttcgggaggccaaggcaggcggatcacgaggtcaggagatcgagaccatcctggctaacacagtgaaatcctgtctctattttgtaaaaatacaaaaaattagccaggcgtggtggggggctacttgggaggctgagacaggagaatggcgtgaacccaggaggcggagcttgcagtgagccgagatcatgccactgcactccagcctgggtgacagagtgagactccgtctcaaaaaacaaaaaaacaaaaaaacaaaaactgattggagcttttagggaactttgataacctaggaaccgccaaaagaaagtggtgacagcaggtctagcacctacaacaccaaggagcaggcagagtcactgattaagctttaggaggaaagcagctctaggaactgtctgaaagccacaaaaaggaaaactgtaacagagaagcagaaaatagccagagaacgtacagataaaatatcaggaactgattctagctggtgactataaaataatatcattagaactaagccaattggggctgggcgcagtggctcatgcttgtaattccagcactttgggaagccaaggcaggcagatcacctgaggtcaggagttcgagaccagcctggccaacatggtgaaaccctgtctctactaaaaatacaaaattagccgggtgtggtggcacatgcctgtaatcccagctacttgggaggctgaggcaagagaatcgcttgaacccaggaggtggaggtttcagtgagctgagatcgcaccactgcactccagcctgggtgacaaaagtgaaactccgtctaaaaaaaaacaactgaccaaaatttgagaactctaaataagcttgctaaagcctaagctttttttctgctttcccactttatgaaaaggactctgaaattcccttttaagacagtaatgaccaaaaatagagactaagaagtcacacttttaaacacatacctgctattttattcttcaagcgttcgatttcttcatttagctttttgatttctttatctcggtttgaattgctgagggcccgagatgagccgtggagggactgcacggtctgggtggactctgagggatggagagacagcgtgaggtgcagcctggccgcagcgcccccgcctggccccggagccggcgctgccctcaccttgcagcttcctgctcagctccagcttctcctgttccagcctccgaatcctcctctcgtaagcttccatctgcaggctgtgctccaggtcccgctgcacatcctcatctttggttaatgtgttggactgcattatgctcttcagagagcctcgatcagaaaaacagctgggaaaccaagcaacaggtttttttgatctactgaaaatttagcgatttcattagcattttcaatcttcctgaggtgaaagatagtctttttaaatcagcaaacaaaaacacctgagataagactttatggtttatggaaccaaagttagacaagtgaccagatggtcaaggagacactgacaagggccctccccatcgctggtcaaagaaagcgcctctgcaaaggaggggaaatggcatttctaaatcatcccccacacttaactataaatgcaaaaccagaaggcatggatcctgcgtaaagcaaggcttagggggcagccccagctcgtctgcaggtcagcggtacgcatggaccactgaaagcttcctggtttggccaccaactggccaagcaatccaggacagctctttcaactcttcttcccctgcaggctaagccaccaattctagcactgaccagcacactaagccccttaccaaggaccagaccactcgatgacgcacacagccgaggcacaggctgaagcccaggatggctctcatttaatagcttaattcttgggctgctttaggagttacttagttctgcttagctctttatgtgacaatgaagtcagggaaattttgagctcctacgcagagttccataaaggcacccagccccctttagagaagacctggtcagtgtttctccacaggtggtctgagggtgctgggctgctccagccctgcgggatctgtcaagaggagagctctaggcctatctggccaaactacagccatgggcttgggacctgcaagtgtgacaagcatttggtgagctggcatgtattagaaagatcaagaacctctgcactgggggctggtaaatcaatatgcccacccagaaagcctcctgtgggctggaagacagcagctgccactttggcttatgggctgtttaaccctggcctctcacaccaaaagagatttcttccaagctcgagcagaagtatggggatatcagccgggcgcggtggctcacgcctgtaatcctgacactttgggaggccgaggcggggagatcacgaggtcaggagatcgagaccatctggccaatatggtgaaaccctctctctactaaaataaaaaaaattagtcgggcgtggtggcgggcgcctgtagtcccagctactcaggaggctgcggcaggggaatcgcttgaacccgggaggcagaagttgcagtaagctgagatcgtgcctctgcactccagcctgggcgacagagcgagactccgtctccaaaaaaaaaaaaaaaaaaaaaagaagcatggggatatctccctcccaagacattttcaactgtggttccagctgccagaggacgccaggaatcagattctgtggcacagtgggagcttccattgtctcatttcacctctctttcttcctaacccctctcctcttggccccagtttccttttaaaatcgaggtggaccatctcaggcgacacaactttgcaaagaggcccatttgggacaggggcccacaacacacaatccttacaaaagccagcagagtgctctgatggaagccagctctcagctgagtgcgcatggcaactgctctgcttgctgtggccaccgactggatcagagctaaccctgccaatgctggcggcctattggtcaggggttggcaaactacggcctctgggagaaatctcacccccctggcctctgggagaaatcctgcccgaggcctgtttctgcaccatcacgagcatgaatggttttaacatttttaaagggttgtaaaaagaagaacatacaacaaaggccatgaaacctgaattctttacgacctggatatctgtagagaaaaagcctgcaaccttgctatggtatcacctgtagtcatcaggtgtgcatattttaagaccaaaaacccatctccatctcccttaagtaatggcctcccagcgcacacaccacccactagcccgcccccagggacagactgtggtgtctgactgttcatctaccacaggggaagtgtctccctggggaatgataaatccagacatacctttccgttgtgaatgtaaaaccaatgaatggcaaatgtaatccagaaaagcctgtgtgagaaccaggaggtaatatttcctgcataagaacatatacaacacaaatgaaatctacattcaaacaaacaggtaaaaagaggaaagatggttacagtcatggtgacaggaggcactgggcagaacatgtggccttggagaatgcggattccatggtgtcctctgcaggggagatgagtatagcagatctgtctttctcaagcctggccctgtacgctgtatgtacaataaagctcacaggagacacactctgatttcgatgatgacagtggcacaggccgtcaccaggttagtgattttcaaagacttcttaaagccacagaattcactgcttaacacaactgtgtgcagagtccaacagtgtgaacaggtatggtccctctgaggaccccggacagagcctggggactctcaggttcttgacctaagacaagaggccccaaggcaaaaaggaacccaaaggtagattattttagataagtttattataactctatttttcattctgaggatctttctttattaaaaactataaccaggggccaggcacagtggctcacgcctgtagtcccagcaatttgggaggctgaggtgggtggcttgcttgagaccaggagttcaagatcagcctaggccaacatggtgaaaccccgtctctactaaaaatacaaaaattagctggatgtggcagcacgtgcctgtaatcccagctactcaagaggccgaggcacgagacttgattgaatatgggaggctgaggttgcagtgagctgaggttgtatcactgtattccagcctgggtgacagaaggagatcagtctcaaaaaataaaaaatataagcaaagttctttatctgggaaatttcagtgtggaaggagttggagtctggagtcagagtctaggacaacaatcctttcaacaatgacaatacttttctcagcattttctccatgtggtctgaagttcagcctttattttgaatgtgaagccatcaaagcaagtattcggtgcaaatagatttaacttttcttgtttttttttttttttgagatggactctcgctctgtcacccaggccggagtgcagtggcgtattctcaggcactgcaacttccacctcttgggttcaagtgattctcctgcctcagcctcccaagtagctggattacaggcacccgctatcatgcccggctaatttttgtatttttagtagagacggggtttcaccatgttggctaggctggtctcgaaatcctgacctcaggtgatccgcccacctcagcctcccaaagttctgggactacaggggtgactcgccgcacccggcccagatttaccttttccatgaccctacaaggggtacttcatagtttctaagaacctctgctcctcccactaaactactaggagtttccccaggttcatggtcattcatttccagaggtcctggggatgaaacatacagagtgaatgatgatgcttcggtgtaagaaactctctaaattaataagcaacgaagaagattttccttttatttggttaaacctcagcttgtctatccccaaacgaagtcacacatgtatgggtttgatgagaacaaaagaattttacgagatatgagcaaaattctccaggaccaaaggtactggctagtgtgtcaaagaggccctgtcagagccgactggaacaccaaacaagtcccacagctggaacccaactcggaaaatcctgatcttaaacatcagtgcggagactcaaaatctgctattatcatctttattctgaactcttgctgtataaagaaacaccaatgcagacacaaagcgctgtaatgttagaaagatttaacgtgctctcacatgtagggaaaagaccagtaactgagaggccgccacactgcctatgggactgtaggctaagcccatgtcttggtgtctttcaacctaaaaaacctaaaatgtggtgacagggtcacagtgaagctctaatacaatgatgtatgtgacactgctttgaaaagtatcaagtaggctgggcgcgatggctcacgcctataatcccagcactttgggaggcagaggtgggcggatcatgtggtcaggagatcgagactatcctggccaacatggtgaaaccccgtctctactataaatacaaaaattagctgggcatggtggcgcatgcctgtaatctcagctactcgggaggctgaggcaggagaatggcttgaaacagggagtcagaggttgcagtgagctgagattgcaccactgcactccagcctggcgacagagcaagactgtctcaaaaaaaaaaagtatcaagtactgtgaaaataaaagcaaaagtatttctgttgagttgcaaaacaaatgagctgtttaactgaattttactcaaattgagtcatccatcattttttaaaggaatattaaggacccagctgaaggctggaataaaaagcacactgtcttaagtgccaaatttcacagctttatggtgtactgacttgataagcaacgccctcaacacagcactgcatgtcagacccacagccagcaaccctgagaacggtgctttcacactcaccgtgtttctcagcacgtcgtcatccacgtcgaagttggatgtgtcagagggactgctcacatcaggaatataaggtgcttctaggtttcgtatattttcccaatttagaccttcaaaaaacgcatgctttttgaaatcctctattccattctgccccagccggcgttctctactgcagatcagtctctggatgaggtccttcgcttcttcagatacatccgtgacatgggatgggaactggaatcgctcctgcaaggggtggcaaaaacaccggtggacaggtggacgcattcagagagtttaaggtgtacagatatgataggaaacaaagtagaaatggtagcttcaaagcaggtcacttcatgggaactaaatgcaatccaaagctaataaatttccattcccaaaaggcaaacaagaaaaccagtggtccttctggttttactcattgtagacttgtgaccacactgcatgtaaatgacacattttacctatggaagtggcaaggaatgtgggaaacatgccgtgcgcgggaagagggacaggcgcagccccgtcagaatgcacagtgcacgcgtcacggcagctccgcttctggaaactcacactaaaaaagcagttactaagaggaaacacaacatgctcaggactgcactgtattttgaccaagaaaactgcaaattacctacatgcccatcaaaaaagagactcgttaaaaaagataccggctgggcacagtgactcacgcctgtaatcccagcactttgggaggccgaggtgggcagatcacctgaggtcaggagttccagaccagcctgaccaacaaggtgaaaccctgtctctactaaaaatacaaaaattaccgggcgtggtggcggcctgtaatcccagctacctgggaggctgaggcacgagaatcgcttaaactcgggaggtgcaagttgcagtgagccaagatcgtgccactgcactccagcctgggtgacaagagcgagattccagctcaaaacaaaaaagatggggcacaaagaaaaaggaacatgtctgtgtgctgctatagaaagacaccacagatacaatgacaaaaaactgttgatatgtaacatgatgccacgtatctaaacacacacatgcgcacgcacacacacgagctgaggtctgccgaggccacacaccctcatggtagagtgggctgagagctgagccaccacctctgtcatctacagaaaggaagaacaatgtcacctgcttcacggagtgcctgacccaagagcccacaggtggtcggcactcagtgactgctggcaggctcttagtaataacgaagtcccagttgttactttaacagaatttgtcactaagaagtggatgagacaattttcattatctacaatatgcatttttgcattgtctgaagtttttatagggggtatatattaatttacaaataaaaatatgcttctactttgggaaaaacgttttttaaaactgtaacttttgctttgctttggagttaaatggaaaaccagttcccgcttcagtgttaatctgctccctgtgagagcgaactgtgggaggccctggctggaggacaggccagcactcaatcaggatcattctgggatctgtcatgtgcacaggagacagcggggagggaaatgctatgagcacgctggtagagagggtgaaatcggcattaggaagacacatgactgactgggtgcgatggctcacgcctgtaatcccagcactttgggaggccaaggtgggtggattgcctgaagtcaggagtttgagaccagctttgctaacatggtgaaaccctgtctctactactaatacaaaaaaattagccaggtgttgtggcaggcacctataatcccagctactcaggaaactgaggcaggagaatcgcttgaacctgggaggcatagctgagattgcaccattgcactccagcctgggcgacaagagcgaaactccgtctcaaaaaaaaagataaaaagacaggcaggagaatcgcttgaactcgggaggcagaggttgcagtgagccgagactgcgccactgtactccagcctgggcgacagagtgagactccatctcaaaaaagaaagacacatgactaaggaaaatttttaaaaagaaataaaaaatatcagacagaagagaaaatgataaaaaggaaaacaaaggaggtggagagaggtgacatggaagtgagaaagtgaacagttcggaaagggaaggaggaaaagaggaaacaggatggggaggatgaagggctccaccatctggagacacatgatcatttacagggactgatttctggggaacagacttgagaatcaaagttggcacctaaccagtgaatctagagccacaggtcaaagggcccacctggacctccccactggctacccccgggcgcctcactccatgcgcctgtgcagacgacgcgtctgtctacagaaacctgccttccctccaggaagccagcttggagcaggccagcgtccttcccctgagagtgggggtgggggtcaccctcagaacctccttccccttcctctggcgcccacatctcctggtgccgaccccgcctctggatgccctctccaatgtctactccaatctgcctgtccccagtttggtccaaaccccgtcacctcttcctcaactactcgcgttgcttcctaacggatcttcctgcactagttgtgctctctgtactttaggcctgagccaggtaccaaaaaaaaaaaaaaaatgcaacgtcttacttcatggttcatgatcttcccataggtctccacgagtgactccgcataaaacggcgtttctccatagagcatctcatacatgcagacacccagagaccaccagtcacactcaggcccgtatttgcccatgccgtcctccatcgcctgcaggatctccggcgagatgtagtcaggtgtgcccacggccacggaggactgcaccttaggggagaaggaggtgctgaaggaaaccctagggcatctccaatcacatatttccaactactttctctaaaatatagcggaggcagaaaatgaaataatcatagaataaaactgatgaatgatcgtgttttttaaacccagtaattcaagctgagtatagtgcctcgagcctgtagcctcagctacttgggaggctgaggccggagaaccgcttgagcccaggagctcaaggccaacacgggcaacatggtccccaaccctgtctctaacgaaacaaaacggaatttaaaaacctcaataatgcaaaattcaatgcaaataaatatccttttgaagcactaaacattatgcggctcccagaatgcatgaaactcttgtacacatggtctgtcaatacccaaataccagccacagccccaaacagtgcctctccaatcccccagggttggcatttcccactctctgtcactgctcccagtgtgatgcaggggccacatgtgcacaggccagcctttctgattttcatgtgcagcacgcagggagtcttgtgtagggtctgtttttagaataaagactccagtggggcacaagaggctgcatttctaataagcttctgggggtactaaggctgctcacctgcagccgaccctgtggtcttcctcatgggaacatgcagaagttggtccaggcattagccgggtgctcaggcattccctggacagcgcaccaggaggctaagaccgctcctacccccgcaagggagaaaacagctcccctgctatctacatcagcaggcaggtgccagagtacagtgacacctctgcagaaagctgcgagggcacgggccacctcagagcaagcgggaggagcctggtgaagctgagaaatcatccaagcagagagaacgatggagagtatagggccatcctgacgggctgagtctctaagactgaggctcaggcaggaactggagacaacaaccacaggcctgtctggggaaggccaggctctcccgagggtcccctctgggaagagagacacagggtccaagcagcaccccagagccagtggtgtgagaactgctcaggctgaatggatcagcagagaactccacctctatcacttccctgcacgagtgcgtggccagcccacaggagctcctacagacagcgggaccactggggtgttgggcggtgactccacgatgaacaactactgtgacggggtggagtggaggtgaggagggtaacccatgctctggttaaaccatgacggggtggtgtggaggtgaggagggtaacccatgctctggttataccatgacggggtggtgtggaggtgaggagggtaacccatgttctggttataccgtgacagggtggtgtggaggtcaggagggtaacccatgctctggttatactgtgacagggtggtgtggaggtgtggagggtaacccatgctctggttaaaccatgacggggtggtgtggaggtgaggagggtaacccatgttctggttataccatgacggggtggtatggaggtgaggagggtaacccatgttctggttataccgtgacagggtggtgtggaggtgaggagggtaacccatgctcttgttataccgtgacagggtggtgtggaggtcaggagggtaacccatgctctggttatactgtgacagggtggtgtggaggtgtggagggtaacccatgttctggttcagacctgttctagtcactggaagactggagtggaggacagcacccgcctaccaattaatcaatatgtggtcaagactattaaaaacaagagactggctttgtggaatgaaaatgagcaaactgctttatttcttataaaacgctgtcaactgaagccagtcacatgggtgcttccactactgcttgaaaatccgccagtaggcaagaaagggattgctctctcggaaaactatttgatgttagaccttatgataagtgtaggtttcaaaaaagaaaagactccaaacatgtaagaacaaaactgcaacagtggccacagacgcagtgaaagcagtttgctgcaagcagctgccaacagggtgtgagcagagctgggactgcccccatcaggctactcggccatgacgctggtctgactgcggggtggagaccacagggcctgtggcctgagcctgggtctcctggtgatagccgatccgggggcaacctcctgttctttccctgctggcgggagtgtcagctggccccgtaacactgagcacctaggactctatttctaggtctacaacacccatagagaggaaacccctagcaggaagttacctgccccaacacaagtgagaaagtacagttacatggttaatgcctgcccacccgaccagcctggacagggccctttaaggaagaagcagggagcgccctcgatctgctacagggctggcatgcttttagccaccttgggattgaggaaacctgacaactcccattctggaaggcacacatattacttttgtaaacataaaaagcaataaagatgctttccaacttaatttttatttgggaaacaaaactccccaaacagaaaatttcaactatctccaaaatggattcattttctgaattaatatacttggtttcttaattgtacctcaaattgaaaacttcccttctgactatatgccaaacccaaaaccaaatggaaaatctccaacaaaaatacctacagtgccatcatcattcatcttcaaacatgatccaaagtcagccaggcggatatgaccattcacgtccaaaaggacattgtcaggtttaatgtctctgtttgtaaaataaacacacaaattaaccatctccatgcaacacattaggtagatcaaagcccttaactagtggtgatcagatgaataaatgctaatatcctcttgtgaacagctgtcaccatccagtacaaatgcctctgtgtgacattcagctggcatggtggcagccgaagtcgtatcactgcccctcgtttagtccccagttaccctggcgaggccctgtgacgattcctactcgtctgcccacccagctaacgagcccctcctgagcatctccttggtgccaggcactgctctccagcccacccacctatgcacgtgacaacgctgcccctgccttcatgaagcctgcacacgagctgaggtcttgcaaacacaaataggcactgctgtctcaggcaggctcacacggtgcaagctctgtgctgagtaccacggaaaacaggaatgggacaaagggacagagggacacgtgtggaggaagctggctgggggctgccacacaaagagacggcagtggccagacgaggtccaggaggcaggtggcgatctgggggaagactgctgcaaaccgccccatacccccaaaactgcactttatagatgaagacatggaagctgagccaactgcccacagttacagagcagcacgtgctggagcaggaacataaacacaggtctgtcccactaacgcctgtttctaaactactttctgtgcgctctcaaacacatgtgcgggtgcagggcacctcagagcatgaatgcttttttctggcacaataagcttacatgactcaacagtatgaatgcaaacaaactttaaaaacaaagacagacattcagcaaaagacaagtacaagcatgttcccagcggcaccacttctaacagccaaaaggcagaaacaatctaaatctctgcctccaagagaatgggtgagtaagctgggctatactcgtgtgatagacaccacaccccaatgaaaacagacgggtaccaactcccccagccacatgaatcaatctcacacaaacatgggcagatgataattcttacctcaaaaccagaaacaaaacacaaaaccagaaacaaaaacacaaggcaaaagaaactctagcatgtaacactccaaactaaaataaaatatcctcaaataaacattcaggaatacgaaaaagaaaacaaaacaaaatcccacaaacacacaaacacacacacacacacacacacacacacacacacacggccaggtgcagtggctcacaaactataatctcagcactttgggaggctgaggcaagagaattgcttgaaccttgggaggcagaggctgtagtgagctgtgattgcgccactgcactccagcctgggcgacagagcaagaccctgtctcaaaacacaaaaacacacgtacacacacaaacacacacgcacgcactagacaaaagcatgcagaaaagaagagctgatttaactcagggaagaaatagaagaaacagataaaatcttatcagaaatgaaattataagaggaccaaacaagaacaaattgaaacaaaaatctaatgaaaaattgaagaaagggaagaaaagatctagaagaataaaatgaggtaaagaaacaaggaaacgcagtcagataggaagcagccagaggctaaagtgggagacaggcaaagaaggcccaacagatgcataactggagtccctgaaagaaatcaaaacaaaacatgactaacatttgactacaatccaacagaactttccagaaattaaaaaaaaaaaaaaaaatacctgaatctagaatgagagggcccataagattaaaaaaaagaaaatatcaatgtcctcttttttgaagccagccaagttgatattgatgctcatatgaaaagaaaagccagaaaaaccctgaagagtgagctgtgatgaggatcaggcccagatgatttcaaaacacactacacagcctccctaattaaagcagtgtggtgctagtgtgtgcagaggcagagagaaaatggaatagagtagaatgtctagaaacaaaccaactacataaagaaatcaagtacaggacaaagataatacgaatcactggggtaaagatagacttaaataaattggtgttgtgacaactggagagccatttaaagataaaattagaactcttccttgtgccgtatataagaataaacctgaaatggacccaagatccacatggaacagatgaacctatatgaatgaaaaagtaaaaatactaaaaaacaaaacaaaacaacccccccttccaaaaaaaaaaaaaaaacaaacaaaccaacacgtgggttttctttttctgggagtaaggatttctcattcgattatgtacaaaaatgtttaaaaatctgtgtggcaaaaaaccacaatgaaccacatcaaaaaacaaatggcaaattggggaaaaatatttgtaatatatattacagataaaaggcaaatacttctttaagaattgggggaaaaaagccagaaatccataataaaagggtaaaaccaatgaaaaaactcacatacacacacacaaaaatacaaacatgatggtcaacatcacgagaaaggtgaaaaagaaaactacaattgtgtaccacctgtcacccatcagagggcaaaaatacaaaagtctgaaaatgcacggttggcaaagctgcaaggaaacaggcactttcatccactgctggtgggaatacaaattggtaatgtctatggagggaaacttacaacatcaaataaacctacgtatgtaatttatttctctcttgatccagcaaccccacttgtagagatttaccctgaaggcacacaaccaaaacaaaaaccaccttgcacaagggtatttatttctacatttataattgcaaaatattggaaactatctaaatgtccactcttaggagactacttgaataaactatggtagttacctatggtagttcgcagtattatgcaaacataaaaaagaatgaagagcaggccgggtgcgatggctcacgcctgtaatcccaacactttgggaggctgaggtggaaggatcgcctgaggttgggagtttgagaccagcctcaccaacatggagtaccctgtctttattaaaaatacaaaattagctgggagtggtggcgggcggctactcaggaggctgaggcaggagaatcacttgaacccaggaggcagaggttgcagtgagccgagatcgcaccactgcgcgccagcctgggcaacaaaagcgaaactctgtttcaaaaaaaaaaagaaaaaaaaaagaatgaagagctccatgaattgatatggaatgatttacaggatacatcactaaagtttttaaaggtatcaccttttgcttaacaaaggataaacaagaaaacgcctgcatggacgatagcagaagacagcagactggctacggatcctgggttgccagcggaggtgggcaggataaagaaggggcgacgcttctgagtacaacttcatgcagttttggaagcacgctaacgtcctacgtactcaaagaataaaactcaatcaacaaaggcggaagggaagtctaaaatggaaaactgattcaaaccaatgaatccaactgtatttcaaataaataacaacactgaagggggagatggggttaaaacaaaacaaaacaaaacaaaacaaatccaagtgacttatgaacacagaacttgaattactgcaggtgaggggtgcagtcccaatgagatgggggagaaccgcaaacaaacccggaatgcctgcgggcaggtttgcttctgtggtgtcctgggcagagcaattctaaagcttttttagacacatctcaggactgagtgagtgcacgtactaacggtgctgggagtcacagtttcagtaggaggaagacaaaagtctggaaagggaggaagtcaggaagttaactcatgattcctgagtatgcacaggtagacgtgtgtgtccatgagtgtgtctatacctctgttactacctctgtgcactgaggggcctagaagcaggcaaccccatagtaatgcgcatgcccagcacccagaacttggtcttcaaagccgctccccactaaagggccttgagctcttctgagaaacaacggagtggggacagagaaggtataggatgagccagaaactaagggcatcctcaaaaagtgaagaggcacagcgcaaacacaggagtcggctagaatgccaaatatgggccaatttcagcacaaaaataactaagatagtgaattaaaaaccactgggagaaagaaggatccatgtagccacactgatcacaaacagaccaatacacagggagaaaggggttgcttccttagaggagaaagccggatgacgactggtcagcatggtgggtctggagtttgtgagtcaatctgcaaccatgcaaagactggtctaggcaaaattcattaatgggtactaaatctctggaggaaattttaaagaggaagaggatatttgcatggtcttaaaagtatctccccacagggaaaaaactatatagcagaaaaatctaacaaaatcttaactgcgtgatgggtttatcaccaccaaggggctgatggatattgtacacctgtggaaatgacaccctgagaaggacacaatatagctatacacacacattccaagaggaaggaacacatcatctcaatctatcagaaggaaacatcagaccaaaccaaagaagtcttctactgaaaaagcaagggacactgtattcgccaaacacatcaatgttcttccaacatgccaatgtcacaacaaaggaaggatgaggaactattctagattaaaagagattaaagaagacatgacaataaatgcaacatgtgatcctggactggattctgtactggagggaagaaaatactgtaagagatgctcctgggtcaactgctaaaatctgagtaaagagggtatgattaagcatgagtagtgtaagtaagaattttggggtaaatgctcttggtacatgcagcttattcttagatgggtgaggaaaaatctgtacgtgtgtgtacacatgtggagagggagggggatgtatataataggagccaaaatattaacaatacgtgaatctgattaaaagtatatgggtgctttttgtaccgttcttgcaacccttgtataagactgaaattttttaagtttgaaattatttgaaacattatttaaaaagaaaacttttaaaagaatgcacatgtaatatgattccatatatatagtattttaaaacaggcaaagctgatttatgctttcagagcctcactgtctaacatggtagcccctagccacagagggctattcaaactcaaattaatgtaaattacataaaatgaagaatttggttcttttgttgcaccagccacgttttgagtgctcatgagccacatgtggctggggctaccgtattgagcagtgcacatctagaacattctgtcactgtggaaagttctgcatagcactgtgggggggatgaggggtggtgacccctggggagggagtgatgggggagccccaagggggcttatctgggtgctgctgtgagcgtgcagttttgaacaatccactgagttgcacccctcggtttgggagctttactgaatacctgtgacatatctcagtaagatttacataaagaagtcaactgaaatggactttaaagttacaaaaagccctcctatcccaactacagataacagtgatttaaaggatgtttttgctgggacccagaaataaaacagccaccagttataaatggcagacacagtacctgccatgcataaattgtcacaattgaccctcaggccagccagtgtggtggggtagagacggtgctcctctcgttacggaagaggcagctgaggagcagtgactgctgccgcctcccagcctgcgctgacagcacagtgacatcacgaatgccagcacctgtgctcacgtcacacgctgcaataacctaagaatccactcaccgcctcaccaactgtttcagcacatcagaattcaaaaacaatttttgtctcacattactttagcagctttgacacaaaatctttaagtctgaaagaaaaaaatcaaaaggaaaacatctgctgaatatacatatattcaaaaatatatatattcaaaaaatatatattaaaaatatatatattcaaaaatatatattaaaaatatatattttatttatttatttatttatttttgagacagagtctcactctgtcacccaggctggagtgcagtgacacaatctcagctcactgcaacctcttgactccctgggttcaagcgattctcatacctcagcctcccaagtagccgggattacaggcgtgcactaccacgcccagctagttttttgtatttttagtagagacagggttttgccatgttggccaggctggtcttgaacttgtgagctcaagcaatccacacacctcggcctcccaaagtgttgggattacaggcgtgagccactgcacctggcccatctgctgaatatattattttcactaataaaaatcctcttttcttggaagtgtctactatacatatttaaatacatctcaattaaatttgcttcagaggaacaaattcttcttcatacgttatatatactacgttcacttcccaacagactccaccagtgttgggaagaaaggcaggtatctgcaactctgaaggctgtgtgcacagggcatgccgcaggtgggttctcaatgagccgctccacatgggatgcgaggcttctggccaagagcacgtctattaacagcacttttggggacatctaacagactctcccacgtccaccagtttttctgcattcttttctcatgaaaaaagagtgaaaggcagaaagagagagggagagttggaaggatgagaggatggaaggatggagggaaagagggagggagggaggggaaatgaagaccaacactcctggaagcagaagcagacccagcccttcccctaccctccccatgaccagggcactcagaagcgctcactcgacctcacaaacttttcaccatggcttcctgcctccactcccttctgtgagtcacccatgtaaataaaagatgaccagttttatgacaaggaagacttgaagcaatgcatacaggacaaatgtatgaagagaagctcaaggaggttgtgtaacaagctctatacctggctgccgggaagaaatggattaaagacaaggataattacactactttatttagactggaacaaactggttcttctccccaaaaatctcatcatttaggcttaacttttttggtttgggaatggaaggcagggcaattcagagaaatggagaaatgattatataggaaaatgtttaaggcaaataaccataatttcacatacacacgaaaaatgtcccaagtggcctgagacaggctaggaagacacagaagagagtaaggaggcgccgagacacgccacaacaggtgttctatggaccgagttagcaggaatgcaacgaccagagtccaggctaaacaggacctggttgccaggaattccctataaaacagggatgtttttccaggggccaccccaggaccaccaacacagtacactctgagaagacaggccgaggaggggtctccggaaggccatcttccttgtataccttccaggggccatttgcacgcactgggggtcatctgcgccgtataattctgtatttaaaacatgtggtggtggttgattttttttttttaagtgaacttgctgtttgtgtgaggaaagctctcctgacagaagagcactggaggttcagggcaagggctgacctatggctcccaaccgccgaggcctttagatgggcagatgcccaggccaactgagagagctgacggtccccatgggccactgtgctgggactgcctatgtccattctcctctaatggcacagcggggagcagcggcgtcttcaggggagagtcaggcacagcgctgagaagcagctctaggctcccccaagtgcattttctcccagctgctgagattctggctaaaatcagtggcatccagcaggtgtgggtgaaagagccatggtgaattgcaggctttatgtctcccttccagctcttcctctgacactgaaaagggaggctgcttctgtccctcaccgtaccatttctgagtgatgtcaactcccacttccatccgttccccttgtggaacttcctgctgcaaaaccagcagaggtctgattcccacagcaggtgtgcctcagcctccagagcacagtccaccacctggggtgtggctccagagccactctgaccgccagatcttctctccgaggttttcttttctttttttcctttttgtcagatttcctctacttcatcttctgcctcttctactcaactttctactttagcttttattttccaagactttttgttttctacatattctttttcttaaaatttgtactctgttcttattttgttcatacactatactctctgctctctctttagggatgtgatgttctctctctctctcttttttttttttgagacagagtatcgctcttgttctccaggctggagtgcaatggcgcgatctcggctcactgcaacctccacttcacgggttcaagcagtcctcctgccccagcctcccgagcagctgggagtacaggtgctcatcactaagcctggctaattttttgtatttttagtagagacaggttttaccatgttggccaggcaggtctcaaactcctgacctcaggtgatccacctgcctaggcctcccaaagtgctgggattacaggcgtgagccactgtggccgatgttctctctctgaaaccctttgtgtcattcatgatctctgcctttccggatatcatcaggggctgacctctcaggaaggagctgtacccacctgtgaggggcacccacagggtcctggtctgccactgatttcctcacccggaaggcttttggggtccagctgcggaaaccaggcagcagctgtgaaacctgcagacccccgcctgcggggtgggatccccacagcacccgactaaccccaggaaggggcccaagcggcagcacagtggcacgggctccaaaccatgctgtaacgtcagccacgccgtaaagttggccacaccgtaacatcggccagcggcaccactctggcgccaatgacatttctttctgaccctaccaaatgttcacaatgcccccacctgagactggggtaagacaggcctcctagaaaaatctctgttctatttttagattgcatctgggcactcagtctgaataatgagttaatttggggggaaaaataaagttttaaaattacatattttgatgtctactatgcccggacgtcaaacgactgagcaaagcttctacacagccaattaagagaatgaggatggctcacgcctgtaatcccagcactttgggaggccgaggcgggcggatcacgaggtcaggagatcaagaccattctggctaacacggtgaaaccccatctctactaaaaatacaaaaaaattagctgggcgtggtggtgggcacctgtagtcccagctactcgggaggctgaggcaggagaatggcgtgaacccgggaggcggagcttgcagtgagctgagatgatgccactgcactccagcctgggtgacagagcaagactccgtctcaaaaaagaaaagagagagagaatgaggagaacgctttctatttagggggagaaaaacaatttaaaaggtggtcaaactaatttccctggagatctgtgataaatacaaagacatttatttctctattgtgaattaagttctaccaagaagacagtataaaatctaaatgttaaaacctatactaacttatgggccgggggaggtggctcatgcctgtaattccagaactttgggaggccgaggtgggtggatcacctgaggtcaggagttctagaccagcctgaccaacatggagaaaccccatctctactaaaaacacaaaattagttgggtgtgatggtgcatgcctgtaatcctagctactcgggaggctgaggcaagagaattgcttgaacctgggaggtggagattatagtgagctgagaccgctccattgtactccagcctaggcaacaagagtgagactccatctcaaaaaaaaaaaaaaacaacctatactaatttataaaagcaagcataactatgttaagaaatgtattttttaaaaagaaagaaagagaaagcaatgtccacaacctcatcacactaaatgagtgtctgttctatcgggacagctccctgtgtgctgggaggtgcgagccatcagcaatgaggctaaggaaaggcgcccacctctctagcctcaacttcctcctctagcaacgaagcagcactccagcaagacggaagagctataactcagcagcgcccttgctccccacacaggaggggctgtgtctgcttgggaaagcctcctgatcaccacggagggggcccgagcacaggcctacagctcagaacacaaagccatggagaccacaatggcctcacacctctcgagagcagcctcaaggtggaagacacagacacatgtgatgcctgcgaagtcccaaggggaaagtggtttccaactaaaatctccacactggataaagcaccagtcacagacacacatggaataaaggcactgatttcaaaaaactctctcatataccccccttccagccaccactggaggacacgcgctaccaagccaaactaaaaagccaagaaaaagaaaaatgaacggctcggaaaagctgggagccagtcccagaaagggagaggggatctctgcacttgaaaagccatctcagaatgagtgcagcacaggacaaatgaggaaccaacgtggaagagaggaggggaacgatggaagggacagcgccaaggaaaaccagatcgagactacccgatgcatgtccggtacggagcttcataacgtggccacaatatctggggacaaattagtgacagctacaaagaaaagctaataaaaagcaaggcaattatcaactccagagaaagcagaagtttatgtaagtgtagttctcaactacaaggctgctgtcatagttacgcagtcacagtattatcaacaccaaatgctgactgaaccatagctgaaaggatggattttaaccattctaatcaggatgacgtggagccgggcgcggtggctcacgcctgtaatcccagcactttgggaggccgagatgggcggatcacttgaggtcaagagttcaagaccagcctggccaacatggcgaaatcccatctctactaaaaatacaaaaaaattagctgggcgtaatggctactcaggagcctgaggcaggagaatctcttgaacccaggaggcagaggctatagtgagtgaaatcacgccactgcactccagcctgggtggcagagcgagactccatcctaaaaaatatatcaaaataaaaatgaaaaggatgatgtgggagaaaggaagacagtttggaagtatatgtgagagagatgggtgacagagagaaagaggtaattatgtaaaagagttaaaatttcaatttcatagatgtgatctaaagccaaaaaagaaaagaaagaaattagcaatataaacctgtgacttaagacacatgaaggcagatgctggaaaaataattttacaaatttacaatagttacctgaccaagtgtaatcagcggggccagggctgggcttggttttggttggaggctctatagaactgtttgactttttaaacctattaccataaaattatcttgtaataaaaatacaagtaaaactagtttttaaaaacaacgaaaaccaaaacaaaccacaggactgaatctttgagtctcaggacaagagggatgtgaagatgtggactcagtggctgagtcactggggagctgccctcccagccgagaaggcagagggggcccctgagagcaggagacggagctgctttaggcctctgccccacacgctctctcagctcaactcctgcaagtcgcagtgatggaagcctcttcctcaagccctatttcctttgtgagtgtcctggggcccttcaggggtcagcacggcacagagaagaccagagttgagaaagaatgtggggacagagggccccaggccccacacgagacatttcagggtggtaaggacagaggaccctgagccccacgtgagccccagggagcacaggcattttagggagggggtcttgggcggtagagacagaggaccccggggcccacgtgagccccagggagcacaggcattttagggagggggtcttgggcggtagagacagaggaccccggggcccacgtgagccccagggagcacaagcattttagggagggggtcttgggcggtagagacagaggaccccggggcccacgtgagccccagggagcacaggcattttagggagggggtcttgggcggtagagacagaggaccccggggcccacgtgagccccagggagcacaagcattttagggagggggtcttgggcggtagagacagaggaccccggggcccacgtgagccccagggagcacaggcattttagggagggggtctcagacggggagaagttgagtcaatgtcaaataaatatcaaaagacacagtggcttcggctgacagcagaccatgacaactgcaacaatgagagctgggatccaccggctgctggggctggaagacggtgatgtgggcaaatcagtctgtgctgcggcagctcaaagtggggactcgctacctacatggcttcttgggacggcctggacttgggagctctgaaaggagtcttttaacaattaaacgtggtttccataaaatatatcagaagccggttacctgtgcacgtaatgaagctgatggatggagtcaatggccagcaccatttcaccaatgtagaacctcgccatatcttccggaagcttgtcttcaaatttgctgagcagggtcagtaaatcaccacccacatagtaatccatgactaagtactacaaattggaaagagaaggggagagaataccacatttagtcaccactaaacctgacagttacaggccagtcttccatggcgaggttctcaggctccaggtctggctcgtggcatctcagctgctcttctgtcacccaagaccctccttctggaacatgcgccccgatgcgtccacgacgccgccatcttcaggggtgcatatggcagagagtggacttcagtaagtgatgtatttaatcaatgggaggaatgatgaaagggcttgaggttggagagggcactctaaaagctagtgacccaaagcagaagcacagttaatagcccatcaatcctatgggtttaaaaataattctccaggccctcatgttatgtgaggacgacaccagaccagagaagggaggcaaagtagttaacatcacacatggtatcagcagttcttattggaaagattatatcataaaagagccgaaagataattacttataggttcactccaacagaaacctcagaaaagctcctacttaagtagaaattggagtaatgggagaaaaaacatctgctaacagggctgagcccgtcacttccccgcgagttccctcgccaccgggccagccgtgtgctgggagtgggcgaccccgaggtgagcctgcgtagagctctgcctgaggacagcctgtctcttgcagcactcagaaagctcagaccacaaagcccacagtctgtggaggccccagtggggagatctcacaggtcagagaggcccaggacaggcaagaccatcacagccagagtcagggtggcagccaacacctccatctctggggccgctgtgcctcagtgaatgctggggaagcacgtggcctgaacctcacaggagccgccttccttggtgcaaatttcctgtgaagagatggatgctgtggtctggacagctagcttttaactaacccgcacagggagtaaacgccctgtttatcagccggggcagggaccctgtaatatttatggagaacctaatcatatcagctgctgtcaccatgaaggcccacgctcgggcccaggctgtgagacacaggccagtgctgtcctgttcacgctcccacctgcccttgcctctggcaccaagaccccatcgacacgggaggcttggggatgggcccggggtctcccagcaagcaaggacagagcaaagacctgggcccaacagtcagactccacgcccatcacattcaaccagactgcagtgtctccaaaggaagggaagcaccacaccggtgggcttgtctgaggaagggagcggcccagctaatcagaggaaacgacagaagccttcattttaggtccctgctctcaacagaatctttaccagcaaactctcatcccttccaagcctctccacagctgtcccaccctgtggagtcttcctcaagcctccctgccaccgccaagggcagccccagcctccccgccctggctcaggcactgcccgtccttccccgccgagtttttcaatttgttcattcgctcgtgcaccctcactgtggccccgccagcccctctggcaacaggggtgctggcatgcacgagacagcgaggtccctggctcagcagagctcacactgggggcgggagagaccgtggccagcatggagagcaggcagtggtgagcgccagctgaccgcaggccgcctggtgaggtgcccaggccagaggttgccaagcagaggcctgaggggagccgcggtcgtgctccagatgaaggggtgcgtgcaaagcggctaggaggaaagtggcagcggcaccctggagcctgccaaaaggggagggccggccacagtgggggctgcagccccacactcagagcagtgagtgggtgatgttccccagctacgttcagaagcccaggcaccgaggtgccactgcgtgtggagggcgatgcagagggggcggtggatgcacactgcaggcattccagagggagcggccccggcagctgacggacacacacggggccaggggagatgcggtgaacgaacggccaggccctcgggcccctaaggaaggccgtggggtcgagtcaagcccttactagctgagccccagccgcgtccacgtctgccgagaactctaagaggaggagcttcctacagcagcactgggtctgatcaacggtctcctggagcatggtctctgaggaaagctaacgcgggagctcgtgaggcagacggcggaggcccactccagaatgagaatcagacctagtctgtcctgtcacagaacgcggggtgctgagttaagccagtaagttttagttagcagtcaaacaggtttaattttgataaaactctgtgagatagctccaatagaaactgtagcagaacccgctctgtgggtggtcagaggaacccacgtttccatatcgctatgagaggcacctgacaccagcctgcactcgggccagcctcacaaccataggaagaggaactggcctaaccctcaacgcccccgctcaaggtggcaggtgtgcaccgcagaagccggccccgcagtcacgggccagaaagcttccaaggcctcgccttcgttttctcatccttaattttcatggtacgtctacctgggcaactccaaaatctcaagaacatggaatcttcacaggggctcctaactgacgtgtgttaacttagaataaacctggcaacacctaacatttcagatggcagcacgctatgctaatttaaaaaaatattagaaacaaaacaagcatcatcatcttcctttgtacagatcccagttgcctgtactccctggaaacttcactcagttcttatcgaaagtggaaatgaactggagacagtccaccggggtcctgggagcagggacactgagcaggaagcgggggggtttatgtggaggtggccccagagcaggggatccggaacctgctcgccaggctggggctgggtcttggtcacaggtgctgtcatccatgtggtcactttgggcaagtgacttcgcctccctctgccccagacacccccttatgaaacagtggaatcactgggtcgttgggaagacggacggggacccctgtgggcctgaaacatcctaagtgctcaacaaacaccagctgccccctctgctgggcaaacacatatatataaagtctacataagtacacatttttccctaatcctgggtgttcaaatctcagggctttctctgatgcttcaagggctcctttagggtgaatggaaggatcccacactactccatctgctgtgaaccaatggagcgcacaacccaggagcttcaggtggacacgcacgttggctgccaaggaaaaggaagcctcgggtccctgctctgaggcttggtgaccacagcgaccacgcccctctcgccaccactgcagaaacagtgccattgggaatgagttgggctgagacctccttctctgaggtctgcccgcgtcacgtccacccagagctccagcagtggacactttcaggttcaggcaaacctagagtcactctaggaataaaaagtcctgaacaaggcggtctgcgggtcactcagcggccaagaccaagggctggtttccccttcaccgccaagtcagctgccttagagtgccgtggaggcgaacacgcttgacaatgcacatgcatgtgcgtcacgaggctggtccatctgtcctgaaagcaagccctgtttaaatcggaaaaatacacaggcagcgtggagactaagagtcacctaaaacctgtcgaaagggcctggggcaccccccccaccgcgggaagacaggaggactgcaggcccacgagaggcactcccggactcagccctagctgagatggaggcaaaaacatccacgtggcttaatccccactgcggttccttattctcaataatccaagattgaaagtgtttcaaactcccagctgatttaaatgtaataaacccagcaaacaaacgaatcagcttctctagtgattagaaaaaaacaaagtccttacttccacatgtgtattttaaagaagttctacctgacaattactgcatgaaaacaagccccgccgttttatcgagtccaatacacattttttaaatgtcagttccacattgtctgactgaatttttagtgacagcataaaggaataaagccggagcgaatgccctgaccgagtctctggctgtgcgacctaccaggtggttctcgtcctgaaaggcgtagtgcagcgcggtgatccactggcagtcgccgttcaccagcacatcgcgctcctctcggaagcacgcggtctgcaaagcaacgaggggtgtcagtctgtgttcactgggaagcaggccagagagcgtactgccggtctcggggtccctcctgggacagtggctccagccacggtgtccctgccttccgggctcctcctcgtgcaccaccccgaggctgctgaggctgagccatccctcatcccttcctctcccaagccccgtgcaagtgccaagggctgctgaggaggcacttgcaccctgctgtcccacgggcaccatttctgtggctgacacttagattcaccccacccttatgtggattcctgactgggctcctcccacctggcacctcctgactcctctaccagatcaacctctgccaagtatcgatggcatgggcagccccacgtgtctgccctctccgtcctatacccactactgagctgctgtgcagctggcagaaggcgcacacgtttgctgaaatcacagtatagtgatgacacaattgtcacagattccactagggaggcctacagccagcagcacagggcaagaggctgccctctaccctgctacgtcttccaaaagagttttaatgcccaggtggcatctccgtttaaaagtcaccaggcctggccgagcacggtggctcacacctgaggtcaggagttcaagaccagcctggccaacatgatgaaaccctgtctctactaaaaactagaaaaactagccaggtgtggtggcaggtgcctgtaatcccagctacatgggaggctgaggggggagaactgcttgagcccaggaagcggaggttgcggtgagccaaaattgcatcaccgtactccagcctggacgacagagccagactccatctcaaaaagaaaaaaaaaatggctggtcacggtggcccacacctgtggtcccagcagtttgggaggccgaggtgggtggatcacgaggtcaggagatcaagaccatcctggctaacaccgtgaaaccccgtctctattaaaaatacaaaaaaattagctgggtgtggtggtgggcgcctgtagtcccagctactcgggaggctgaggcaggagaatggcatgaacccaggaggcggagcttgcagtgagccgagatcatgccactgcactccagcctgggcgacaaagcgagactctgtctcaaaaaaaaaaaaaaagtcaacaggcctttggcataattttaacatgatttcctctttattgagcacagaacaagattcaaactgtcttacatttgaacttgtcaagcttaacaaaaatataagtacattacggagagcttgctatgtgaggcacgagggcacagttctgaccggctctcagctgagtctcacagtgacctctgaaacttatttcttctacaaggttttcttttctaaactttaaaaagttttcctttcaggctggccatggtggctcacgctgtaatcccagcaccttgggaggccaaggcgggaggatcacttgagcctaggagtttgagaccagcctgggcaacatagtgagactccgtctctacaaaagaatcttaaaaattagccgggtgtggtgtcacccgtctgcagtcccagctactcaagaggctgaggtgggaggatcgatgagcccagctgagatcatgccactgtactccagcctgtacaacagagtaacagagtgagaccctgtctctaaaacaagaaaaaaaaagtttttctttcaaaatgaaatggttggctgcacacggtggctcacgcgtgtaatcccagcactttgggaggctgaggcagacggatcgcgaggtcaggagttcaagaccagcttggccaacatggtgaaaccccgtctctactaaaagtacaaaaattagctaggcgtggtggcgggtgcctgtaatcccagctactcgggaggctgaggcagagaatcgtttgaacgcaggagaccgaggtcgcagtgagccaagatcgtgccattgcactccagcctgggcgacagggagagacgtctcaaaaaaaaaaaaaaaaaaaagatggctgttgcagctgtgtcccagttctactaatgacaacatgacaagcggtcaacattcagcttgctaatgtccagacatgcagagaccagcaattctggaatcatcacaacccctctgccaacagccacctcagccacaagggcctggtgaagggacaactaaagaaaacctgagcctcagtgtgcctgacctcctgtcttccagaacgcgcccccaaaaagaaatggtgatggagtgctgagtcccaggtgaggtgagaccgtgggctcaggaggccggggctgccccgaggatctgcggcacctgtgccaacgcctccaggagacgctccctgaagctctgcctggcagctagctgcccagagcatttaggaaaaacccattcttaaactggggactgcctgcaaggtgacctgctgacaggaaacttatgtattatccagcagttttgtttaaggagcagagagagaaacttttagtattttttaaccaagtaagatgaaataaagaccttgcctggtagaaaaattataaactacactgcttagcaactcttctactgaccaacctcttaattcatgcttttaagaaaattttttataaatcagtattataaaatttaatgcttaaaataagtctatgatataaaaataaaaagataaattatttgcaactagcaccatatttatttttatatctcttacacacatatactctagtataatcaccgcgactggcaaacattcttgagcttttctgagcatgccaattaaactggatctgtgtcaccagattcaaattaaatcagcaatatttactctttttaaatgtactcatccaccatgacatttaggtaaataccaaacacctgatacctctctacactttcatgtaacagtagctactttttcccctaaaaatttgctccaataacattcctgtgtttgccactgtttggggcggggaaagggctgctggggctgagggcaggcccagcggaagcacacagtgagatgactgagtgaagatggaggaaaagagagcaaaggcttctcccaaagaaggaagggagaccgtgtacaccccagaagctgggagacccagggggccgaagcaatcacaggccaccgacattttgagaccagggtaactacaaaatggtgctaactctgtcaaccaacacgcgttcagtgagcaacaaatggttgtgagaccttgtgctgggtgccatagcagggaaaggggaaatgggtgcagagcgggggagggaaaagccagaatgactgagtcacgaggaaccgataacacccaccaagttaataaaacccagggccccagagagatctggcccgaatcgatggttgtactgttgtcggcccaaggtggcaaccatcatgggcagcacaggcacaaattccaggaccaaagaggaaagcgtcacctcaaattactagaagggtgagaggagtaagaggagagggtctagaaacccaagaaggacttcccaaaatgaggaggtggccacgtcgagaggttcaactccagaagcaagcgctgaccgcagggctgagcagcctagagccaccgcagcgctgccaggcacaggcctcgctcagggcgggtcagagacacacggggccacagcaaaccattgtgatgaatggcagcctgcaaggaggggactgccaagtgccttctggcagaggcgggagtcacgggagaggatggagcatgatggacggagcagatctgaagcaggaagcaggtcaactggccaggaagggcctgggctctgagtgcaggggaggggaagacaacagggcgggtgaggacagaaactcaagatggccagagaggaaaagcgtgggctccccagcaggcctggcctgccttaggcaggcaggagggagaccaatggcagagcacgcggctgtagaggtggggtcagaggcatggaatggccaccaagaagactgacacggaactaagaaaaaggagctgatcaaagcctgctgggcagtggtccacttcatttctaatcgtgaggatcctctaggtgggaatctaaagacctattctgtatgtgagcagggtccaaacgtgttaattccttttgtgtatggagcagaactgcaatcaatgctgaaactctcccgatgctttttatttgcctttacagtaaacaggacccgccaacattctcgagggtgcactctcaggaacagtgtccagcaagcaagtggtcgctgaggcggggagcagcaggcgccagggaggagactgagacctcctcaaaagagagtgctcgctctgtccggggggcagggaggcccagggctgtggggtggctgcagcttttccccagctggcttcacagtcactttctgctcaccccaagccccatttgtatggcttttcaagctccatacttacctctgctcttttcagcatctcccacttgttgaggattttcattgcataaattcgttcagtattcttcattttgacaacagcaacctgcagtgcaaatgtgagttgaacaaagatgcggttcttgaacaaaaggctagcacgctggagctaaactgtagtgaaatcctaacagcccaggagcctgtgaaaccagcagtgaccgaaagccaagtttcccacctagcatgtgccagttcctgcatcaagaaccttttcttcacagagaaagggaccggccacgtgggctccggagtttcactcctgcaaattcacccctttatggctcgggttccaccactacaggaggttaatggcaggaccggactcctgagacacctatgaggacccatgagcactgacagttaatgtgcccagcacactgtggggcacagtcagcactcagcgcgcggccaccagccacattctttaaagaacaattcaagtgccacctccttcaggaagtcctcttggactttccagtttctaccaaatcttgaataagctctgccatcactaccaacacccgtcaagatgtctgcaccattgtctggtgcattccaccctacgtaagtcactcacacacgggcccaagtctccaactcagcacttcctgtaagctactcactggcagtgacagcggcttccataccttctggctgccaatggcaagcagccagcatgtccccgtgcctgcagcagccatggcctgaagaggtcttaaatggcagtatcatctacctgcctgtttctaacatcaaataccacacagtcacatcgtagagtcactgtgagagctgccattcaccaggcacattctgcgtgccagagacggtgttgagccgcgcatccgcacccccacttcaccctcacagcgaccccagctgcgggggatttctaaaatccatcttgtacagatatggactctgaggctccaagggaacaagaccaaggagggaatccaagaagcaaaggccgcatggaaaggacaggctcccttcaatcagaggagctcaaaaagcgatcaatgttatcttctttgaaactcacacaaaactgagttttgcattaagtttttggcaaaaaagagtactaaaaataaccgtaaaccattctgttaaaacaattttctctctcattccttcatttcccttggtcgtctctctgccctggtgtgcctctccctccctcctaaatgcattctggaaagtcctgccatggctgaagggctctgtgtggcctgggccctgctcacctccaaagcccccatgcctggcacagctcaatgcttggtagcagacagacaggcaatcacttaatgcaatctgtttttacttttaaaaggctttctcaactaggtacagtggctcatgcctataatcccagcactcttgaaggtggaggcaggacaatcacttgtgcccaggagtttgagactagcctgggcaacatagcaagatccctgtctctactaaaaagaaaaaaagaaaacaactagccaggtacagtggtgcatgcctgtggtcccagctacttgggaggctggggcgggagggttgcttgagcccaggagttcaagatcagtctgggcaacatagtgacaccccatttctacaaataataaaaaaaattagccgggcgtggtggcacatgcctgtagtcacaactactcaggaggctgaggaagaagggtcacctgagcctgggtggtggaggctgcagtgagctgtgatcatgccagcacactccagcctgggcgacagagcaagaccctatctcaaacaaaataaacaaactctctgtcccatcctggcctgtggtaaattgactttggctggtgaggcctggatccagggtctgtactgagataaactgggagctccgggcacgatgggacgagccttgcaggggctgctctcctcccctatccctctggtgagactcactcatggggatggtgctgcgagaggggggctatttccctaaagtactgatttgccttctttcacgtctgcacactggaaaatgcacgccctgcacagcaaaggccatctcgctttgtagtggtgtccagtaggtttgctgtgggcagagcacacctgctgctgggatgtgacacagggcgtttccttgtttgatttttcctcagtgaaccaaaaggcacagttccccagccaaggagagcttagatcaaacctcagcataggtgctaaggcactgcacagtttaagaagcaaaacttggccaggcgcggtggctcacgcctgtaatcccagcactttgggaggctgagatgggcggatcacgaggtcaggagatcaagaccatcctggctaacacggtgaaaccccatctctactaaaaatacaaaaaattagctggcctggtggcgggcacctgtggtcccagctactcgggaggctgaggcaggagaatggcatgaagccaggaggcagagcttgcagtgagcggagatcgcaccactgcactccagcctgggtgacacagcgagactccatctcaaaaaacaaaaaaagcagcagcaaagctcttccggtgactcactgtcaaaccacccgaggcggtaccgcggccgctgagggagcctgacctctcccttggtcttggcagaactgttctgcaaggccgaggcaggtctgtggagatggcctggaaggcgaggccacaccgtgccacgggcctcctggggcagggctcccagccccatacaagggacctggtgagcctctccagctgcacctgcatgactggccctcctcccctaggcaaagccaaccggacccagagccacaccgcgtgtgtcaacagcaagcaagtacagagcatgaaaacagctgctattcgaccctctctgtgttttttagaaaatgccaagaagtcaaaattcaattaacaaatggagttttagaaactacgtcagaaggctgggcgtggtgactcacacctgtaatcccagcactttgggaggctgggcggggcatctgggcaggtggatcacttgaggccaggagtttgagaccagcctggccaacatggcaaaacctcatctctacaaaaaatacaaaaattagctaggcacagtgtcagcacctgtagtcccagctactcggaaggctgaggcatgaggatagcttgaacccagaaggcaaaggttgccgttagccaagatcgcgccactgcactccagcctgggtgacagtgcaagacgtccatctcaaaaacaaaaacaaaaaaaactacatctgaagaaactatttttggtcccaacaatctcccaggtcagtcagaagctttcgagtctcctttctcttcattctatctttcagattttctccccagctccttgggaggccgaggcggggagatcacttgagcccaggagttcaaagccagcctgggcaacatggtgagacctcatcttagaaagagagagaggaaaaaacaaactctccaaataatactaattacctcatccccaaaccaatgtataggtgcacaaaaaggtgaaatggaagctgctgatgttttggcaatttaggcaaagttaacaaaatgaagtttatcttacctcaccaaaagcacctcttccaattactttaattatttcaaagtcttctcgatgaagctgcatttctttcaccagctgtgtaaatggtttagctacaagtaaaacagtaaaaccaacaatttagtctaatcagttcatactatataaaaatttaattgagtggggtgttgcactaagttatacttttaaaaaagtttgtttgaaaatatttaatatctgacatgttttggaaagtgagcacttataccaatggacacagatgtggatcctgagcaactgcagccacgcactgggtaacactgttgcagccacgcactgggtaacactgttgcagccgacgacggaccacatacagaacagtgatcccacaagatttatactactgtatttttaccaaatctttcctatgtttagatacataaatatggccaggcgcggtggctcatggctgtaatcccagcaccttacgaggctgaggcaggaggatcacctgaggtcaagagttcgaaaccagtcagaccaacatggtgaaatctcgtctctactaaaaatacaaaaattagccggatgttgtggcgggtgactgtaatctcagctactcaggaggctgacacaagagaatcgtttgaacctaggcgccggaggttacaatgagccaagatcgtgccactgcactccagtctgggcaacaaagcaagactccatctcagaaaaataaataaataaaaatagacacacaaaaaccactgtgctacagctgcctacagtgttcggaactgtcgcacgctgcacaggtgtgtaacccaggagcagtaggttgtgccacatggcctaggtgtggagtaggttttgccatctgagtctgtgacgtgctgttgtcatgttcgcacaatgacaaaaaccacctaaccatgcatttctcaggaggtatccccatcgttatgcaacacacaacagtatacttcagtatctatcatagcaaacatcatcacacaaaagtctcctagtcaaagccaataggtgaacacctatcgagagagcaactgatgggtgcccaaagcccacgtacaggacacaagtgcgtgaggtgagtgagagctgagctccacctgcctgcacgcaggagccacggggcagctcagggaacacaagacattctccaaggcaacacaagtgctggagtctccctggacacccatggcggtcccgaataggtcctgtggcgtctgtaacagtaatgtccaccagtcaggcaccttacactgctcttcccggcctcctcacgcggactctctgagactaattctgttattatccacacttcacagatgagaaaactcagccaggtttctgtgggcactgtactgggctggatagtgtccccagcaaaactcatgtctgctcagaacctgtgactgtaacctcatttggaaacggtccttacagacgtaaccaagtgaaaataatggcacctgctggaatagggtaggccctaagtccaacaagactggtgtccttctaaaaggagagaagtcagactcagacagaggtaaaaagagccaagtggggatggaggcagaggcgagagtgatgcggccgcacacaaggagcgccaagcattgccagcacccccagaagctgagcgttccccggagcctgcgagggacatggcctggctgacgccctgcctctggacttctggcctccagagctgtgagataaatatctgttgtttaagccccccactttgtggcaactggttacatcccccacaagaagctcctagaggccaggcgcagtggctcacacctgtaatcccggcactttgggaggccgaggcgggcggatcacgaggtcaggagatcaagaccatcctggctaacacggtgaaaccctgtctctactaaaaatacaaaaaatttagctgggcgtggtggcgggcgcctgcggtcccagttactcgcgaggctgaggcaggagaatggcgtgaacctgggaggtggagcttgcagtaagccgagatcgtgccactgcactctagcctgggcgacacagcgagactccgtctcaaaaaaaaaaaaaaaaaaaaagctcctagagagaggtcaggtcaactcttcccaggaacacagagcacaaggcaaggccaggactggagcccacactgtctgactccagaccagctcgtgcccgccatgtatcctgccagtctggcatccgtgcagtcaattgtctctcttgcacctgtctctattttcaccttcaagcccaaatctgcatgttttatgctaggtttttttttgttctatctggttctttttcaaattatctatcactacagttttatgaaaggtgcctctgggggaactgagtgaagtgcacagggccctctctgtcctatttcttaccactgcaggagtggctacaattagctccaaaacacatgcgatctgacacttcctgggcttctgactgagttccatattattaatctgactaatcctgtgggttttttctcctttaatagttgctcaacaccactgaggttcgatcaccacaactgcaagagccacagaaggttccaggggcctgggagacagtgagttatgaacaatggcccccatcacagcaaatacacatcagcagagatcaggaaacagaacaaatgagtcctgagttattaaaaaagaaagaaaggccaggctgaagaaaacccttgagctgcactccagcctgggcgacagagtgacactctatctgaaaaacaaaacaaaacaaaaaacagtgaagacaaagacagatgagacgcaggaagcagttcgcaccaaggctgtgcccggaacgtcctctcttttctttccacattaattactctcaagtcacccgggcttccttgtcaagtttccccctactcttttgataaaacacattttgttaattacgtagtttaatagttgtgtacacatttccctaaagcgggcagacacagatgatggtggccaggctggaagtgggaggaacttcgaggcaagcctggggtgaaggcttggagaggcaaaaccacaaaagcaaagcagcaggggacctgtgtgcaggcaggagcaagttcccaaatcagagggcaaaggagaaaagggcccagaaggaaaagcctaagaaaaacattatttctcagaaataccaaatattttcaaactgctccgagaacactaacaattttgtactggtgtataaaaataattaggctgggcatggtgacacgcggctgtaatcccagctactcaggaggctgaggcaggagaatcgcttgaaccctggaggcagaggctgcagtgagccaagatctcgccactgcactccagcctgggcaacaagagcaaaactccatttcaaaaacagaaacaataaacataattaagaccgcattagctacaactagaaaggaaagccgcatcacagtagcagagcaccctgctaaccacacaggtactgagagcaggggacagaacatttaacatgaataactgccaactaggttactaagatggaaataccacatggaggtggcaaatgcaggaagcaccttctgccattaggatcaggaaattaaagaagaggctggaatttttatttgagacagagtctagctttgttgccaggctggagtgcagtaacaatctcagctcactgcaacctccgcctcctgggttcaagcgattctcctgcttcagcctcccgagtagccgggattacaggcacgtgccaccacacccagctaatttttgtattttttttttttttagtagagacagggtttcactatgttacccaggatggtctcgatctcctgacctcgtgatccgcccacctcgacctcccaaagtgctgggattacaggcgtgagccactgcgcccggccgaggctggaatttttaaaacttagaaacctggacaaagggccctgtaaaactgaaactcagacccctgaggatggggtgctgctggccggcactgggtctctgagctcaaaggcagccccacaggctgggtccccagtgactggaaggagtgcagccagctgacgctgggctctctgaggtgactgtggcagggctgttctgctggcgtggggaaaactccaaactggcaccagtggccgactgccagaaggaacttcgctgccaggatggtactgctagggtgtcactctaggagggagcgggcaggaagctgcaagtcgtcctcccgcctcccagccttgtagtctccctccagcacctgcttcaggcagagctcaacagggagtgggggggtcagagctccccaggattggctggggtgtggggtggagtgaggaggacatcagtgccggtgaagcaggtgaggggagggaaccaggtgaggggagggaaccaggtgaggggagggaaccaggtgaggggagggaaccaggtgaggggagggaaccaggtgagggagggtggtcctcttgttacctacaggaggactgatcagataagcaacattcaggatgatggggctgggttcctcactgtccaagtgaggagttatagataaggaagaaaacgagaataaaccgtacaacactgggatagaattgggttattggtatgaacttgcagcttcaatatagacagacagatacagggataaacacagccatatatgggtgtgaacatacagagtcctagctctgtctaccgaagagtatccggaagcagcagcagttcagctacaagcacacccagtgtggaccatggtctctaaagaccattctccaacataggacagggctcctcaggcagctccagagctgggtcaggaaaccgcaaggtgagcctgcagcagccggtgcccagaagtgagagtgtgctcaaaatgaacacaagcagtcacagatcataatctattcaataaaacagggctgggtgcggtggctcatgcctggaatcccagcactttgggaggctgaggcaagaggactgcttgagcccaggagttcaagaccagcctgggcaacatgacaagactctatctctacaaaaaataaaatcatgaaccagggtgtagcggcacacacctgtggttctagctcctctcaaggtggaggcgagagatcgctggagcccgggaggtggaggctgcagtgagctgtgtttgcaccactgcactccaggctggacaacagtgagaacttgtctcaaaacaaaaacaaaaaacaccaggaaatcaggagtccacactgatattaacatataaaatttaaaaatctgatgaaaaatgggatatttatatagtttcaaagtacatccaaacaaaatacctatcaattacgcagggaaaatggtgactttacagtgaagtcaggcagacatcacctgaaatcaagcaatcagagcggccagcatcagttacgtgatgagacgcaaccgcacatcccacaggacacgagggggaaaccatagcctcacttctgtgattttcctgcaaagatccacaacccaaatccaaccaccgggaaacaccaggcaaacctaaactgaagaacagtctccaaactgtcagcctgaaaccttcagcagtgtcgaggtcatgaaagtcaaggaaagacacagaactgatcacacagaaaggaacaaggtcatggtgtgtgtggctctgcagcaaacccttccttctgctacagagcagagtaccagaaaatccgcaatgcttcagtggaatctgaaggttagatacagcaatgtatcaatgctacattcctgattgtgttggttacaccgtggttatgtagaatatccctgtctgcaggaaatacatgctaaagcagtggtcccaacctttttggcaccaggggccactttcatggaagacaatttttccacagacccgtaggggggtggaggaggtgaggtgatggttttgggatgaaactgtcccaccctggatcatcaggcactggactctcataagcagcatgcaacatagatccctcaaatacacagttcacaatagggttcgtgctcctatgagaatctaatgccacgctgatctgaccggaggtagagctcaggtgggaatgctcactcatctcctgccgtggagtctggttcctaacagaccatggagctgtccgtggcctgggggttggggatccctgtggtaaagtattcaatggcaaacagctgggggaggagagttcttctgttatttgcaacttttctgaagtttcaaactatttcaaaaatgttttaaaaatacttttagaagttcatttgttgctatttggaaaacttagaggggcaaggagggagggcccactggatacagccaccaccgccccattaagataacaatggtggcttagaaatgaatgggacagtggtcctggaacagaggaggaagtcgcatcgatagtgttggaactagagtggattgtggcatgggatgagcaaagaagattccaggatgtgcactaggtttctagccacagcagcttgatgaatggggtgctacacaccaaagcaggagaggccaggagagcagcaggttggggtgaggaggggagtagggcctggggcaacggaatccaattacatcacgtagttagtgctacagtctgaaatcgtgaagagaccatctcaaaaaattgatttttcttacaggaccctactgctgttttatattttcaaaaagtgatcacttcgaaaccaccagcttccatggggatggggagaggtgaggcgtgagaagtgggagaaccagcctgttgtgaggcaactagagacagacacagcttccagggaggatgcaggccattcggttttttggtttgtttgtttttgagacagggttttgctctgtcgaccaggctggagtgcagtggagtgatcacagctcactgcagcctccacttcccaggctcaggggatcttcccaccttggcctccccagtagctgggaccacaggcatgctcccatgccagctaattcttttttagagacggggtcttgctgtattgtccaggctggtctagaactcctgggctcaagtgatcctcccgccttggcctcccaaagtgatggaattacaggggtgggctaccacacctggccatcctgaaatatgctaaggccctagagacacggccgccctgcagctcagaagctgggccaggctaaccagccagcactcacaaggctccaagttgcagcaactgggaggctactgtccaccacgccttgcattgcccacaccatcacccacagcgtcagccatggcacctgggcatcatctcagacttctcctgaagagcccgtagccctcacccagcacaaagccacctcttcctgcccgtcttcctcaccaggctctaaggcagggttgatcgctgctcccctggacctgccacgctgacaggactccttcagcacagctgcctgtgtctatggcatgtggcaactgacattcacgaggagtcatcaccaaagggcggccttctctacacagggggttcgcacccctcctaagataaggacattcaacatcttgggagattttccatccaaaaggctgaataaagctttagcctttagacagcttaacttttactggagaaattttctcctcatcaatctcttcattcctcctaccccgaactgtcccctaaagaacttctcttgatgctctagaaaacaatggattaatcaatcaagtgtaaccaccgacaaatatgagatctaaactgtaaggcaaaatggagcccagtgctccctttaaataggaaaagctttgccaagaagaactgcaggcggagggaggatctttgtctaaaactgacagaaaaccattgtgaaatcaaacaagatgagaccagctggaaggagtgcccagggtgggagggtctgaggaaagaggacggtgtcaagagctgaagcctgaggcaggcgggcaggaagtcctgctttcccctgtccggcagaagctctccgcctccccctggatggttctgttcatccgtgccaccctgactgtttgggcctcagctgctttgtggccacaatcaatacatttggaattggaaagagtctgacaggttatccattacgaataataccttttaccaatgaaggtgaacagggccccaatggccaagcaacatgcagaggacacaagggacagacgtctcgcccccgagtcgtcaactccacccacagcgtggttctctcctgaggtcctctccttgtaaccgccagctaccactccgtcccttcaagagatggcaggacccacacctgcctggagcagcacctccacagctgctggagcgcgggggcagctgcaggggaggcacctaccgacggcccagcaagacctacgcggaggccgagggccagaggccaggctagagaaggtatggatgtgtgcgagggcccaggcacactgacgcgctatgcatccggacctcctgcagagagagaaggggccagagcagcaccccagggaccaaggagtgcagccacagtggacggggcacatgctgaacccccgtgagagagagagcacagggcgtgtgccaggagtcagcgccttggcccgcacgtggcagggaatgcaggcgccttcacaggaccaccctggagagagttcacagctccaaaggcttggaatttattcttacggttcagacggctgacgcagctacggaagattagtacctatcacaaagttttagaaaaatgtgttcaaattacacaaaatgtgttttctttgtttcacaataactaagctcttttgtaagatgtcagaatactgcctttgcaaggagccagccacagacccctctcatcaggaatcacgagtctgagaaaagtgactcttcccacaagccctcttaaccccaaatacagttctctaaataggagctctagctgatataggagcacaggctgataaccaggaagtataacgctgtaaaaagaacaaccattaaattttaacttaatgcaacttgagactttagaggattaaaaagggagccctttaagaacacgtggatgtggccgcgtgcagtggctcacacctgtaatcccagcactttgggaggccgaggcgagtggatcacgaggtcaggagatcgagaccatcctggctaacacagtgaaaccccgtctctactaaaaatattttttaaaaaaattagccaggcgtggtggcgggcacctgtagtcccagctacttgggaggctgaggcaggagaatggcgtgaacctgggaggcggagcttgcagtgagctgagatcgcgccactgcactccagcctgggtgacagagtgagactgtctcaaaaaaaaaaagacatcaaggccatcctggccaacatggtgaaaccccatctctgctaaaaatacaaaaattagctgggcatggtggcgcgtgcctgcagtcccagctacttgggaggctgaggcagaatcgcttgaatccaggaggcagaggttgcagtgacccgagatcgtgccactgcactccagcctgggcaacaaagcaagacctagtctcaaaaaaaaaaaaaaaagaacattcagatgcaaaagacaggaagacaagtgagaccacagattgagtctgagaaaacctgaggagcggggtgggccagagcgggggtcgtgtggtacaggcggggatcatgtggtgcaggcgatagcagtctggtcagaagcagcggtgagatcctggctgttcctgaaagtgagacgagcggatttcctgctggatggggcgtgcaggttgacactcgcacagagcactggccaagcactaggacgctggagttgcctgcatgggaaggctgacagaggctggtgggctgagtggcagggaagcagctggacaggtgatgcagttccagagagaagcccaaggtgcccagtgtacagctggtatcggatgagatcaccaggaagtcagcagagagaggggaggggccaaggacagaaccctggggggcttcgacatgaggtggctgcggggaagagaagccagcagggtgcagagaaagccaggacttccatcctggaaggtggatgacaaccaggaattacctactggcttttgccacgtggagaccacaggtggccttgacaaaagcagcagttttgagggaggcaggggacagaagtctgattggccttttgagaatgagagaggtggggtggagacagaagagagaaccctgaagagttcttgttgctgttgtttttgagacagggtttcactctgtcggcagcctggagcacagtgatgccatcacggctcactgcagcctccacctcctgggctcaacggatcctcccagtctcccaagcagctgggactacaggcacatgccaccacgcccgggagatgtttgaaatcattttcaccaaagtgttttgtttaaaaaacaaaacaaacaaaaacaccactcatcttggcatagacggaaagctggcccattccccacgggtgctcacatcacactcgtcaactgatccagctgttagggggcagggtatcacccagagatcacagaggctggagacaagttcattctcactggcttaagtgttaacaataaaccataaattaaattctagggtgacaaaataaacgccccaagcttcaataagcaattgtgagaacacagccaattccttgaaacgaacattattggtgcttgctgcatctgtgcctccacccagtcagtagggggtgtttctctggaatgggctcacccacccccctcaggctcccactgcaccagtccacaccagttctcttaagaactgttcatttacacaccatgaaaaaagcagcaacccacagatatagctattttttttcttttcttttccttttctttttttttttgaggcagggtcccccaggctggagagcagcagtggcgtgatcacggctcactccctgcagccttatctcctgggctcaagtgattctcccctcagtctcccgagtagcagactacaggtgcgcattatcatgtggctaatttttttttttttttttgagatggagtctcactccatcacccaggctggagtgcactggcgcgatctcggctcactgcaacctctgcctctcgggttcaagcatttctcctgtctcagcctcccgagtagctgggattacaggtgcctgccaccatgcctggctactttttctatttttagtagagacgggtttcaccttcttggtcaggctggtctcaaactcctcacctcaggtgatccacctgccttggcctcccaaagtgctgggattacagggatgagccaccatgcctggcagtggctaattttttattttttgtagacacggggtcttgctatgttgcccagactggtttcaaactcctgggctacagtaatcttcccaccttggccttccaaagtgttggaattacaggcatgaaccactatacctgatcctaattgttttttctttggtagaaattaataattttactcactggtttttcttaattttttcctttttttaactgattttcgagtaaaaactttagttttgacaaagaaaatatattcataaacatatacacttttattaagtcaactactggtattatattaaatatatatcttctaatatgcagaatatatatattctaatatgcagattttgcagctcgccaaacagaggtatttaagatcacgcacagatcaattttcaaagacaaaaggcagcacacagtgcagggaaatctagtcccagagggagcccccatgtcagctgggcaggacccttcacaccagcagcactgatgggggcggtgcccaccccggccccaggaacaggatcacaggaaatgagctcagctgctgcactggagcaggatgagaaatcgagaatgaatcctcactccttcctagtacaacgccagagtagtcctaaatatatacagagacgctctcccacacactccaaactgggctgggaccgccaggacaggaaggacgacgtgacagccaggaagagaaccgtctacgcatcttcctcctggaaggcctcggacttgtctctgtttaactgaggcggaaggacagaaaggagccccaatgctctggcctctagagttctgtaacagagtccgtcctaacttactcttcctggctctctaacccttgagactgagacttgctaatacacttctagaagacagtgggcacagcactcataacaaagtacagtgattaaacggtatctacagtgattaaatgcttcctaccccgcattaagaagcagggaggaagagttttgaatgtaagaaagtaaaaagtttgcaaagcatcagtaaataaggttcaaaggagagcaacttaacttcagtaattagtaatttggggaatttttagcaactattcgtaacatccaccaaactcttaggattaattcaagcttataacatagtccttcctatttgacagacttgagaaggcaggatcttttaatactttcaatttgctttttattctcttataccctaaatatttgatgaaatattcaacccacccattgctaatggcagcttccactttctgaacatctacatatgggtcagggatgttatataataatatctctacaggcatatggtctcaaaactcctgggctcaagtgatctgcccacctcggccttccaaggtgctgggattacaggcgtgagccactgggtccagtctaaatgtttggtatttttaatcccttgttatttgtctttactccccacataagactttttacgtgtcagttttaaaattcagaggcaaaaattaactccactcatttttcttgttgctcttaacttaatctagtagacagtatattttgaaatttctttgtgtcactgctgtgaattcagaaaagtctggttttctttctgcacagtaaaataccagctgctcctaatgtcatgattagtaccatcttctgaagaattgacagtccatgcagcaagtatcattttagtttaaggtgaactgtgtctttcaaattacttgagaactggtaattcaagtaagcaattctttcactctcctgtaagcaagcacactgtccgatgtgccacccctctcccccaccaattgcacttggatcgcttaggctaacatatgtgtaccctacggcacagaaattccctcccaggtaaacacccaagagaagtgagcaggtatgtctaccaaaaagacacacacaagaatgttcaaagcagctttactcataattatcaaaaactgtaaactacccaaatgtccactcacagaagagtggataacctgtagtattcatgtaatgaactagtacacattaaaaaaaaaaaaagaaaaaaaaaaggaggagccaggtgtggtggctcatgcctgtaatcccagcactttgggaagccgaggcgggtggatcacctgaggtcagacgttcaagactagcctggccaacatggtgtaaccctgtctctactaaaaatacaaaaattagccaggcgtggtggcacatgcctatagtcccagctactagggaggctgaggcaggagaatcgcttgaacccaggaggcagaggttgtagcaagccactgcactccagcctgggtgacagagcgagactctgtctcaaaaaaaaaaaaaaaggatgaactcctgtcatacacaacactgatgaatcacacggatgtatgtgaagctaaaaaaaaaccagacacaaaatactgcaggattccattacatgagactcagaaacagacacaaccccaagatcatgcaatgggggaaaacagcatcttcaaatggtactggggtggctggacaaccacatgctgaagaataactgtgcgcccctacctcacaccatatacaaaaaaattaactcaaaatgaattgaaggcctacatgtaagaactcaaactacgaaacacttaaaacacggctgggcgtggtggctcacacctataatcccagcactttgggaggccgaggtgagtggatcatgaggtcaaaagatcaagaccatcctggccaacatggtgaaaccccgtctctactaacaaaaattagctgggcatggtggcacatgcctgtagtcccagctactcaggagactgaggcaggagaatcgcgtgaacctgggaggcagaggttgcagtgagccgagatcacgccattgcattccagcctggtgacagagtgaggttccgtctcaaaaacaaaacaaaacaaaacaaaaaaccacatgtaaatctttgtggccttggattaggcaatggattcttacaggtaaaacatgaaaaacaggtaagttaaacttcaccaaaataaaaatcattctgttttttaactacaaacaccaaacctgaacaaaaaaatgttcaaaagaagccattaagaaagatggctgggcatgggtggctcacacctgtaatcccagcactttgggaggctgaggtgggcagatcacaaggtcaagagatcgagaccatcctggctaacacagtgaaaccccgtctctactaaaaatattttttaaaaaattagccaggcatggtggcgggtgcctgtagtcccagctactcaggaggctgaggcaggagaatggcgtgaacccgggaggcggagcttgcagtgagctgagatcgcgccactgcactccagcctgggcgacagagtgagactccgtctcattaaaaaaaaaaaaaaagtgagaagacaaacaacagaagcgtaggaaatatctgaaatcacatatctgataagggacttacatccagaatacacaaaaagctctcccaactcactcataaagacaaatatcccaatttaaaaatgggcaaaggatctgaatcatcatttctccaaagaagatatattaatacaaatgcccaatatgcacagaaaaagatgctcaaagtcattcgcaatcagggaaatgcaaatcaaaactgtaaccagacctcacttcacacccactagggtagctacaataaaaaagacaaatcataacaagcgttggccatgaggtggagagatgaactcttacacactgctagtgagattgtaaaatgatgtagcctggcagttcctcaaagtgctaaacacagttactacatgacccgtcattccacccctaggtatataaacaggagaaatcaaagcatgtctgcaccaaaacttgcacactgcatgtttactaagaaccaggttttaaaaaatttaatataaaaaaaatttgtacatgaatattcacagcagcatcattcgtaatagtcaaaaagtgaaaaccgaaatgtccatcaactgatagctaaataaacagaatgtggtctacctagacaatggaatactactattcagccagagaaagtaattaaataacaatacaacatggatgaaccttgaaaagattatgctaaatgaaagaagccagctacaaaagaccacgtatagtatgattccatttatataaaatgtccagaataggcaaatccatagagacaaaaagtatattagtggttgccaggggctggggagagggaatgctaagtactgctaatgggtacaaggctcaggggcaatgaaaatgctctagaattagacagcggtgagagctgcacaaatgtgtgaatagagtaagaaccaataaatcatacacttaaatcaaaaagccaggcgtggtggatcacgcctgtaatcccagcactttgggaggccaaagcaggtggatcacttgaggtcaggagttccaggccagcctggccaacatagtgaaaccccatctctactaaaaatacaaaaattagccaggcgtggtggtgcgcacctgtagtcccagctgcttgggaggctgaggcaggagaattgcttgaacctgggaggcagaggttgtgatatgctgagattgtgccactgcactccagcctgggtgacagagcaagactccttctcaaaaataagtaaataaaacaataataaaaaaccaagcacaacgaatctgtgatatgggtcacaacagtgtgtaccacacatgagggggtcacaacagagactacttgggtgcacgattcattaatttattcaaaaagtattaaaggtatttaaaaatattcctgaaatgaagcaagacattgtggctacgagtaagcacctgagtccttcagacttcaccgcttactgtgttgcaaaatactgagcatgaactccagtttccttgtgggtaaattaaggataatcccagaactgtgggtgaatgtgacagtggatgtcaacaatgagcagtgccaggctctgagacagccccagcacgcagagccagcctaatcgttttgtgatcacatacgcatcacagaagatgtgctgggcttcccctttcccacagaaacagcatggaagcccctcccaggaacacgcccgtctgcagtgcagctcagtgcctggtgcacagctggcgctcaacaggtgcatgtgagtgaaaagaaacccacagcttccagaaggttcttcctacgtcacctgcctccttctatattctgtgcccatgaacttggacatccagaacatactctcctatctaaatacaagtacatgcaattctcccttaatagggctgttatttatttgtattttatcttttattatttttaaactcattcaactggaaaatactagtgacaagaaaaacaaattcatgccagggactttttttcatcctagcatagatcctgagatcagcagagttgatctgagttgctgaaaccttctgcatataaaccattttcagcagggttcttaacaactgtccagagccaagtactgaattatctgagtccaactgccaatctttctaaattgaatagtcaatatgtcaggaatactatggtgttaaaaaagaaaaaaaggataaaagtaaacatttttatgggaaattttctcttatccaaaattccttcaatcttttaccttatttagacattgactctgcatttctgcatgaggaataagtatgtctctggaagaaaaaatactgttgctaattatatgaaacttctaggacctaatccagcaccagagaagtgaggctaaagaaatgctaaattacgcttgtaatcccagcattttgggaggccgaggtgggtggatcacgaggtcaggagatcgaaaccatcctggctaacacggtgaaaccctgtctctactaaaaaatacaaaaaaattagctgggcgtggtggcaggcacctgtaatcccagctactgaggaggctgaggcaggagaatggcatgaacctgggagacggagcttgcagtgagccgagattgtgccactgcacttcagcctgggcaacagagcaagactctgtctcaaaggaaaaaaaaaaaaaagaaatgctagattggccaggcgtggtggctcatgcctgtaatcccagcactttgggaggctgacatgggcggatcacgaggtcaagagatcgagagcatcctggccaacatggtgaaaccccgtctctactaaaaatacaaaaaaaaattagctgtgtgtggtggtgtgcacctgtagtcccagctacttcggaggctgacgcaggagaattgcttgaacccaggaggcggaggttgcagtgagccgagatcgcgccactgcactccagcctagtgacagagggagactccatctccaaaaaaaaaaaaaaaaaaaaaaaaagaaatgctagattggagccctcagtggccagacacgcatgtgagcgggaagcaatattcaaaacagcaatagcaatccatccagcaactccagccctcccagcacctgaggggctctccagccagcaactccaaccctcccagtgcctaactggctctcacagggtggctgctcctgaaccagaggaagggccaccaagcaaaccgccctcagagtgaggcgctcactttccttcctgaacagaggagaagcgtggagcggccagcccggcctcaccttgcccgacaggagtgaccagtagtcgcccatctccatggggcgtgcccagcacggtatcaaagccctctcatggccaatgaggttgaaggtggaaatggtacctctttttaaaacatttaagaatgtttagaagaatctggttcttttaaaaaagaggcaaagaaagtttgaggagcatagtttggataacaatggcttcactcattttaaatgttatttatttcagcctcaacaattaaatgtgttcaggtggccaggcacagtggcttatgcctgtaatctcagcactttgggagaccaaggtgtgtggatcacccgaggtcaggagatcaagaccagcctggccaacatggtgaaaccccatctctgctaaaaatataaaaattagctgagtgtggtggtgcacgcctgtagtcccagctacttgggcggctgaggcgggaggatcacttcgacctgggaggtggaggttgcagtgagcccagatcccatcactgcactccagcctgggtgacagagggaggctccatctcaaaaaaaagtgttcagggctggctcacacctataatcccagcactgtgggagctgagacaggtagatcacttacgcctagatgttccagaccagcctaggcaacatggcgaaagcccgtctctacaaaaaaattcacaaaaattaggtcagtgtggtggcatgcacctacagtcccagctactcgagaggctgagacgggaggatggcttgagcccaggaggtgggaattgcagtgaggcaagactgagccattgcactccagcctgggtgacacggtggcaccctgtctctacacacacacaaaagtgttcagattggctgccagactacccacctccaatatgtcacatatccaactgaacctaagcatttctgagttactttttttttaattaaaaaaaatattttatgctgatatttttcagtattataaaaacgccggcatgaaggaaatgaaataaaaaaagtacatgacccagacaccaagcagagaaagatggccagtgtgctcctgtatcgtcatctttggctcaccatccccacgtaaacgcagtaataaacaggaaggaaggatgttttcacagaagacttgaaaatgttcttctgatttcatgaaagtaattggtaagccaggaaaactacccttttcaccagatgcctagagatgagacactaaaatcaacaaatgaaagagctttccaaataatcaataaaactttacggcaaagtcagcaaatgtttaacattttgcaaaaggacatctagctttgtgcagtctgcatttcctttcacaagctacaagagctgtcaaaaatgcttctccttaaacaaacgctgcagtaaaaatacaagatttatactaccagggtttatttgattatgaaaattgtacttttccagaacgtctggcgatttccaatttgggatgagcctggtatttctctacaggcgcccacacgcaggcctttccccagtgctctcagcaggaagggcctggggctcccaacagcaccaaggcccagcctctgtgcagcctgatgtgcaggtagaatgcccaacccgtctggcttctaagggctggattccggaaaccaactaaaaagctgatgtaccagagactacagcatcactcacatgggtggacaagtatcaactaatttttctgaacttcaattaaaaaatcaaaaagcttaagatcacattttaaaaagttgagtcctcactaattgtcaactccaaagtgtctccagtgaacaactactataagacctgccttctattattattattattatttttttttttttaagaaaaatgccacaagcccagggcatcctcacccagcaagcagcagagggagccaagagcaccagccggcggccagccttgtggcctcagggcagcggcaggtgtttctgatatgaaggcctggagaagcaacacgtatttcattcacttctccttgtccccctctgctgtctcagagtgacagatccaacctctcatgcccacccacgaggaccaaggagaagggaggtaataacgcacttctcggcctctctgcaaccccgcgtgggtgcacacttgggcctcaggcctcaccagctcctgactggaatatactttaccactgcaacatctgaaatgaaatcagaaatgcctatttttttttacatcgattgaacccccaaatagtttatttcccacaaaatatactgggccaatagtataggaatgatctgtcaaatgccaaatttgtccagctaggaaaacactagaaaccagttaaaacttttgaacaggacaggacaaatgccaattcttccacaaataaactgcaaaaaaaaaaaaaaaaaaaaaggagagagaaagagcttacagattaaaagagattaaggaggtgtacaatccaaatgcctataaaacaaatccacttttttttttttttttttttgagacggagtctcgctctgttactcagtctggagtgcagtggtgtgatctaggctcattgcgacctctgcctcccgggttcaagcaattctcctgccccagcctcctgagtagctgggattacaggcatgcagcaccacgcctggctaatttttatattttagtagtttcatcatgttacccaggctggtctcgaactcctgatgatccacctgcctcagcctcccaaagtgctaggattacaggcataatccaccgtgcccggccacaaatccactttttttaaaaaaaaaaaaaaaggaaatttaaacaatgactattttatgatattgagaaattactgttattttttaatgtcatattattatggctatgtttttaaagaaaaccctcatcttcttgagacacacactgaaatatttacaaatgagatgacagatttctgggattttcctaaaataatcctttttggggaaagggaataaaagtgaaatacaactgactgtgagttgataactgttgaaactggtggttcattattctatatgctctacctctttttgttttatttttgtttttttgtttgttttgagacggagtatcgctctgtcacccaggctggagtgcagtggcgccatctctgctcactgcaagccccgccttctgggttcacgccattctcctgcctcagcctcccaagtagctgggactacaggcgcccaccaccatgcccagctaatttttttgtatttttagtagagacggggtttcactgtgttagccaggatggtctctatctcctgacctcatgatccacccacctcggcctcccaaagtgctgggattacaggtgtaagccaccgcacccagctgctctacttctaaaggtatctgaaatttcctatttgaaattttaaactttgaaatttgaataggaaatattaccaattactatcacttttattaatactcattacacaaataccaccatataaaaaactcaagagactccaaaaaaggaagaatgacattttcatacatgagctcatcactattttcaataatatttaaatagaggatggctgagtgacatgggataccagctagaagtttctgaaaaattagtttccttttacaaatacccaaaacaggaagattgaatcgaaatcactacaagctcctgccccaaaccacacagcagtttcctcactggaagtgcattgcggcaggaaaatcagccccacgcctggtgtatttgccatgagtacgtttgttttattgctggcattccttctgggtcataaagcagttttatgagctgataaaacttctgtacggattctacaaagctgccatggcaaacagcttcagtattcagcgtaacatatctgtctccatctcctgcatctgattgatacaggccctttggactgactggactttcaaaaagtctaagatggcgactctcttactgttaaaatgtttatctaagtcttcctttccaatgtggtactggagaacgctttaggacaaacaagaaacatttaaaattctccataccaaactttatttttaaaaacatttaaggccaggcgtgatggctcatgcctattcccagcgttttgggaggccaaggtgagaggatcacttgaggccaggagtttgagacaaacctgggctcaactagtgagaccttatctcattttaaaaatacacatttaaaaaacagtaaaaatgaaaacatttaaagttcattttactgagaatatttctctcaaattataaatgcagtattttaagcatcattaaacttgcaatacaatcaacaacaggaattaccatagccgggaaaaaaataaactgttaagaaaagggaggtagaggctgggtgtggtggctcatgcctgcaatcccaacactttgggaggctgaggcaggtggctcacatcacctgaggttgggagttcgagaccaacctggccaacatggggaaaccccatctctactgaaaatacaaaattagccaggtgtgatgatacacatctataatcccagctacttgggaggctgaggcaaaagaatcccctgaacccgggaggcggaggttgcagtgagctaagatcgtgccactgcgctccagcctgggcgacagagtgagactccgtctccaaaaaaaaaaaaaaaagaaaagaaaagggatgtagaggggactatgaaatggatactaattcagaatagcctggatttttaaagtttctttccttaatattaaacaaagttttatttatattacaaaccaattattattaaaatgctattggagaaaaactataaaatctgatcaactgaggatctagcagtattcaaaaataccaccattcaataggggcaactagcaattaattctatactttttttttttttgagacggagtttcgcttttgttgcccaggctggagtgcaagtggcacaacctcagctcaccacaacttccgccacccaggttccagcaattctcctggcttagcctcccaagtagcagggattacaggcatgtgccaccatgcccggctaattttgtatttttagtagagacggggtttctccttgtcggtcaggctggtctcaaactcctaatctcaggtgatccgcctgcctcggcctcccaaaatgctgggattacaggtgtgagccaccgcgcccagctcaagtggttttataaatgcatactttaaaatttcactctctaaaatatttttcaggggtcaggtgtggtggtttacacctataattccagcactttgggaggcctgccaggcaggaggatcacttgagcccaggaattggagaccagcctgggcaacatagtaagacttcaactctacaaaatactaaaaacaaggccaggcagccaggtgcggtggctcatgccggtaatcccagcactttgggaggccaaggtgggtggatcacgaggtcaggagattgagaccatcctggctaacatggtgaaaccccatctcttctaaaaatacaaaaaactagctggatgtggtggcgggcgcctgtagtcccagctgctcaggaggctgaggcaggagaatggcatgaacccgggaggcggagcttgcagtgagcggagatcacgccactgcattccagcctgggtgacagagcaagactctgtctcaaaaaaaataaaaaataaaaaaaaataaggccgggcacagtggctcacacctgtaatacaccagcactttggaaggccaaggcaggaggatcgctttagctcaggagttcgaaaccaacctgggcaacatgacgaaacctcatctgtacaaaaatacaaaaattagccaagtgtggtggcacgcacctgtagtaccagctactggggatgctgaggtggaaggatcacctgagcccaggaggtcaaggctgcagtgagccatgatcatgccactgtacttctgtctcaaaaaataaaaataaaataaaatattctttttttttttttttttgagtgggagtctcgctctgtcgcccaggctggactgcagtggcgcgatctcagctcactgcaagctccccctcctgggttcacaccattctcctgtctcagcctcccgagtagctgggactacaggcacccgccaccacgcccggctaatttttttttgtatttttagtagagacggggtttcaccatgttagccaggatggtctcgatctcctgacctcgtgatccacctgcctcggcctcccaaagtgctgggattataggcgtgagccaccgcgcccagcctaaaatattcttaaacacaagactgaaagcttcttaatttttcctaaaactacagtaattctgacgccaaaatattccaaagataacatacaaaagttaaaaccacagactatctacagactactcctcatttggaaatacagatttaaaaaaataataaaaaaaatgaatacgataggctcaactgtgcagttagagaataaaatgccacagctaagcatgttttattctgggaatgcacatatgattctatagcatgtatatcaatacagacaataaaaaatagccaaactaaaatcacagttctgatacatgcaataaccatatttcaacattaatttctcattaaaagtcgtgactttttattttatttatttactgagataatgtctggctctgtcgcccaggctgcagtacagtggcacaatcatggttcactgcagcctcgacctcccaggctcaagcaattctcctgcctcagcctcctgagtagctaggacacaggcccacaccaccacgtccagctaatttttgtgtttttttttgtagagacagggtttcgctatgctgcccaggctggactcaggtatatctgcccacctcttataggcgtgagccaccacgtctggccatctcagacttttagacttatcaaaatcagcttttaatgtttaaaacaatctttcaaattaacattcaattttaatggaaaaagactagaacatgctttaaaataaaaaagcaagaaagacaattataataaactcgggggaaggagactttcacttttcgtggcatacctacttcttgtactgcttaaatttattttatcatgagcacgcttttctttttctttttgacagcgtctcactgtgtcacccaggctggagtacagtggcacaatcatagctgactgcagcttcgacctccccaggctcaagcaatcctcccatctcagcctcccgagcagccgggattacaggtgtgcaccaccatgcccagctaatttttgtataatttgtagaatcggggccttgctatgtcgctcaggcttattttcataattaaaaaaaattaaaataaaaatagtacttgccaaatgtaccttttgtgattggtattctgatactttcaatacatggtatgaggggcaatcccaaatcacagaaaaccgcagctcagcttacctacaactgccctccaaggacgggcccaaagctaagggctttgtaaagcccaaagctaagggaggtggctcaagagatatgtggagaggagtttttaaagaattttaggccgggcgtggtggctcacacctgtaatcccagcactttgggaggccgaggcaggtggatcacaaggtcaggagatcgagaccatcctggctaacacagtgaaacgcgtctctactaaaaatgcaaaaaattagctgggcgtggtggcgggcgcctatagtcccagctacttgggaggctgaggcaggagaatggtgtgaacccgggagacggagcttgcagtgagccgagatcatgccactgccctccagcctgggcaacagagcaagactccgtctcaaaaaaaaaaaagaattttaaaaactggctgggtgcggtggctcatgcctgtaatcccagcactttgggaggccgaggtgggtggatcacgaggtcgagagatcaagaccatcctggtcaacatggcgaaaccccgtctctactaaaaatacaaaaattagctgggcatggtggcacatgcctgtagtcccagctactcgggaggctgaggcaggagaatagcgtgaacctgggaggaggcggagcttgcagtgagccgagatcacaccactgcactccagcctggacaacagagcgagcgagactctgtctcaaaaaaaaaaaaaaaaccaaaacaacttcagcactccttaatagccccaaagcgggcaacccagatgtccatcaggagtggacaaagagagggttgtgaatacagtggacactacacaataaccacaaggaactaagctgcagctatacccaatcatgtggatggatctcagttactcttacttacaattactttttattttttgagacacagtatcactctgttcccaggctggagtgcagcagcatgagctcggcttactgcaaactccacctcctgggttcaagcaatcctcccacctcagcctcccgagtagctgagactacaggtgagcaccaccatgcccagctaatttttctattttttgtagagacggggggggggggcgggtctcattatgttgcccaagctggtctcgaactcctggactcaagtgattcgcccacctcagcctcccaaagtactgggattacaggctacaattaccttttattatggtaaaatatacgtaacataaaatgtacaattttaaccgttttttgagattgaccaagaaaaaaaacagcagcaactcaaattgctaggatggaaataaaagaagggacactactgacattaacagaagtaaagaagattattaagaaaaactatgaacaactgtatgccaacaaattagataatctaggtgaaatggacgaatttataaaaagacacaaactaccaaaattgactcttgaagaaagagaaaatgttaatagatctacaacaggcacaaagattgaactagtaatcaaaaaaataccaagaaagctatccaggcctggacagcttcacaggtgcatctaccaaacatttaaataagagttattaccaattcttcacactcttccagaaaaaggagaacacttcctaaatcattctataaggccagtattatcttgataccaaaccaaaaaaaaaaaaaaaaaaaagacatacaaggaaagaaaactagaatcaattacctttatgaatagatgccaaaatctttaacaaaatacaatactagcaaacgaaattcacaaacacagagaaagaattatataccatgatcaagtgggattcatcccaggaatgtgaggttggttcaacaaacaaaaaccaattaatgcaatacaccatatcaacagaagaaaacgagccacacaactatctcaatggatgcagaaaaatcacgacaaaatccaacaccctttcacatcaaaaacttaacaaactagaaatagaaggaaacttcctcaacctgaaaaggggcatttatgaaaacccgcagctaatgccacacttaatggtgaaggctacacgctttctccctaagatcagaagaaagacaagaatgtccctagtgctgtttctaccctacactgtactgaaggttctaggcagggcaagtagacaacaaaaagaaattaaaggtatccaagttgaaaaggaagaagcagaactatctgtactcacagagataattttatatataaaatttatatgattttttatgtaaaaattctaatgaattcactaaaaaaactactaaaactaattaaaaagttcagcaattttgcaggataaaagatcaatatataaaaatcaatttacctcaggaataaatttaagaaagtaagtgcaactcttacccctgcactgtgaatttaattaatgccactgaattgaacacgtaaaaatagataaagtggccaggcgcagtggctcacgcctgtaatcccaacactttgggaggccaaggtgggtggatcgcctgaggtcaagcgttcgagaccagcctggccaacatggtgaaaccctgtctgtactaaaaatacaaacattagccaggcgtcgtggcgggtgcctgcaatcccagctactcgggaggctgaggcaggagaatcgcttggacccgggaggcagaggttgcagtgagccaagattgtgccactgcactctagcctgggcgacagagcaagactccgtctcaaaaaaaaagttaaagcagcaaactttatgtatttttaccccaattaaaaagaaaactaaacaactctcactctgaaaactgaaactttttttcaattaaatttaaatttatttatttatttgagatggagtctcactctgaagcccaggctggggtgcagtggcgtgatctcgactcactgcaacctctgcctcccgggttcaggcgattctttcacctcagcctcccgagtaggtgggattacaggcggctgccaacacacccagctaatttttgtatttttgtagagacagggtttcaccatgttggccaggctggtcttgaactcctaacctcaggtgatccgcccacctcggcctcccaaagtgttgggattacaggcgtgagccaccatagccattctttatttgaattttaaaagttctaaataagtggaaaggcatcttatgatcgtgggacaagagactttaatactgttaagatggcaatactccccaaattgacctacagattcaatgaaatccttgtaagaatcccagctggcttactattagaaactgacaagctgttcctaaaatgcatatggaaactcaaagaacttagaaagaattgtcaaaacaatcttgaaaaacaacaaagttggaggactcatacttcctaatttgaaaacttactacaaagcaacagtaaccaagacagtgtggtactggcataagaagagacacatatattaatggaatacaaccgagagtccagaaagaaactcatacatttatggtcaactgattctgacaaggattctaagaccattcaacgggggaaagaatatagtctgttcgacaaacattgttggaactggttatctgcgtgcaaaagaatgaatgtaacccctctacctcgtatcatagcaaaaattaattcaaaattgatcaaagaactaaacgtaaatgctaaaactaaaaaactcttagaagaaaacacatgtataaaagaaaacacaggtatgaaactttgtgaccttgcactgccaatggattgttagatatgacagcaaaaaaaacaacaaaaaatatttaaatttgttttcctgcacagaaggggctctaggcagccatggcgcccagccagaatggcatggaagccccacttccacaaggactggcagctggctcgtggccacatggttcaaccagccggcccgaagatccgcagatgcaaggccgggcaagctaaagtgccccacattgccctgcacaccgcgttgggacccatccggcccatcgtgtggtgccgcacagtgcgaaatcacaccaaggtgcgcaccggccgcagctgcagcttggaggagctcagggtggctggcattcacaagaaggtggcccagaccattagcatctctgtggatccaaggaggcagtacgagtccaccgagtccctgcaggccaaggtgcggcggctgaaggagcaccactccaacctcaccctctaccccaggaagccctcggccaccaggaagggagacagttctgctgaagaactgaaactggccacccagctgacaggaccggtcatgcccatcccaaacgtctgtaagaaggagaaagcccaagtcatcaccgaggagaagaatttcaaagccttcgctagtctccacatggtccatgctgacgcccggctctttggcataccggcaaagagacaaggaagctgaagaacaggatgttgaagacaaaaaataaagccctcttgggacttgtaataaatcagcagtttaaaaaaaataagttaaattagacttcatcaaaattaagaacacctgtgcttcaaaggataccatcaagatagtgaaatgacaacccacaaaatgggagaaaatatgtgcaaatcgtatgtccaatatggggcttgtatctagaatatacagagaactcttaaaattcaacaaaaacacaacccaattttttttttttttgagacggagtctcactctgtcacccaggctggagttcagtggcgtgatctcagctcactgcaaggctccgcctcccgggttcacgccgttctcctgcctcagcctcccgagtagctgggactacaggcgcctgccaccatgcctggataattttttgtatttttagtagagatggggtttcaccatgttagccaggatggtctccatctcctgacctcgtgatctgcccgcctcggcctcccaaagtgctaggattacaggcgtgagccactatgcccggccaagacaacccgattttttaaatgagtaaagaacttgaatagacatttatccaaagaagatatacaaatgtctaattaacacatgaaaagatgttcaacaacatccgctattagggaaaagcaaatcaaaaccacaatgagaaacgacttcacacccactaggacagaaaacaacaagtgctggcaaggatgcggagaaactggaacccttgtgggctgctggtgggaatgtagaccactgtagaaaacaacctggcagttcctcaggatgctcaacacagagccttcacacgacccagcaattccactctgaggtatacactcgagggacatgaaaacatatcccacaaaaacttgtacattaatgttcagagaataggtattaaaaataaacaaaaggtactttgggaggcccaggcaggtggatcacctgaggtcaggggtttgagaccagcctggccaactaggcggccaaaagccacctctactaaaaatacaagaattagtcaggcgtaatcccagctatttgggaggctgaggcaggagaatcgcttgaacccaagagatggaggttgcaatgagccaagatcacgccactgcactccagcttgagagagagagcaagactccatctgaaaacaaacaaaaacaccaaataaataaacaaaaggtaaacagatgtccatcaactgatgaatggataaacaaaatgagagctgtccacacaacggagtactatttggccataaaaagggataatgcactatatacgctacaacatgggatgaaccttgacaacatgatgtcagtcatgaaagacccatattatatgacgccacttacagaaaatacccagaacaggcagatatataatgaaagtagatttgtggttgctcagggctggggtgggggtagagttggggataatagctaaaggttacagggttcctttggcggtgatggcgaagatggttgcatgactcgacgaatatactaaaacacaccaacactgaactgtatgctttaaacaggtaaatcatgcatgacttgaatctcgataaagctgttacaaaaaaaaaaaggaaaaaaattatctggtaattgtaaatggcagagaagcctttcttcttcactaaaataaactattagcagtataattcaacttaaatttctctatattgctgacagctggtttctgtttaaaactcctcctaacatattatgtcacaaggattatcaaaacttcataaacacaaatcttgctttttaaaaaaaataattaaatatttgtagaaggaaatatatccaggcttatcattttggttacataaaaccatgtcaatgtctgatgttttgagaaatatttcttgttatgacacagtataatatcaatgccatccctgacaccttaattaactggtaaaactggaaatagagcatttccagtaacttctcaattcgctgctagtcagacagtatttcccacatatttgaattcagtttcattttaaaggtacatcagaaagctgctctattaataaacaaagacttttcaacaatttggtttcaaatacttcgggttagaaaacaaatatccatttaagacagagctgcaaaattattattattactttttggagacagagtctcactctgtcgcccatgctggagtgcagtggtgcaatcatagctcactgcaggttcaaccaatcctcccaagtagctgaactacaggtgcacaccaacacagccggcacctttttttttttttttttttttgagacagagtctcgctctgtcacccaggctcgagtgcactggtgcaatctcagctcactgcaacctccacctcccgggttcaggcaattctcccgcctcagcctcctgagtagctgggactacaggcgcccgccaccatgcccggctaactttttgtgtttttagtagagatggggtttcaccaacttggccaggatggtctcgatctcctgacctcatgatccgccagcctcagtctcccaaagtgctgggattacgggcgtgagccaccacgcctggccctaatttttttaatttaattttgcagagacgggggtctcactatgttgctgaagctggtcttgaactcctgggctcaagcaatcttcccacctcggcctcccaaagtgctgggattgcaggcgtgagccaccgtgcccggcctccaaaattaacctttaaggattgctgcataaccactgataaaatcaacatctttctcaatagtaaagcatcagtagaaatggtatttcaaattgaagtataagatgggtcaggtgtggtggctcacacctgtaatcccagcactttgggaggccgaggcaagaggatcccttgagctctggagttcaagaccagcctggccaatatagggagactctgtctctaaaataaataaataaataaataaataaataaatattgaaaaataaattcggctcaccagttttttaaacaaagtgatagactgaattattttaattcaatgattttgcactaacaagggtgaagtacaacacagcaaggaccctgaagtgctgttttgggtgctgtggcaagggagttctagtcacctttgcacctcgctacgttatttatgtttttagagaatgatgaggggcaagaatatttcttattctgctctggtttattttcaatgggtgatttcctacataccaaaagctctggaggttaaacacagctctatgacatttccagaaagatgaagtttctataggcaactcctgcatcacaaaagcccagctgtgaacagccccacatcacgtggtctccacagggacccctgcaccctcccagccccgaggagcaggcgctgtccagccacccgaggagcaggcgctgtccagccaccgtatttccactttcaacacttccttcaggtactccctgcttcttcacattctcataacccccttctcctctcctccaatgcttgtacagccacgagagaaaaaagaaaaacctgctctcctgtcgtcccatttcctccttctattcatgggggactctttcaagtaagtaagtgtaagaatagaaacagcaacacatccaaatcaaaacaaagaggaactacactctgacttcgtgcagagttgagagctggggcgtctcgcacacctggaaaccacagcggcgcataatcacactgccacgagcctcaaggacaacgtgagctccaggagaacaggaattttgttttcttcactgctgcagtgcctagcacatcttaagtccttaaaaaatatttgctaagtgtacgacaagggatgacagcagactagaaatgtcaacacgattttgcagagtgggaaaaagcaaatggacgagtggtatctaactcagcaaagccagaaaaccagaacttaactgcgcagcaggggcaacgaggctggggaatgagaagaggcgctcagatctctgaaggcctgagggtaatgggcacaaaagagcatccgcttcaagtctgtgggagaagcagtcagatcctcccccaccagccctcctccacctcagccaccttcccagaaactgacagctatgccccccaacccctaaaccccaagcaggagactggaaactcctctctagggagacttacagccccaaaataaagaattctatcactaacttctggcagtggccctcaaattggcagggtccatgctctatttcctcatggtgagactcaacacttaaagtcggccctatgcatacagggagtttccaatcgtcccattcataaccatggaaagacagccagtaatcaccagagtttcggagagaagcctctaacaaagagaatgaccaaagtagaaaacaggtgaaaaagaacgcacaggaaacagacaaggtaggaggcaaagggaaagaaacatctacgtaacaaacgtgtgcaggaatcaataaaacattaaacaaagaaatgtgtctaaaacgcactgccttcatgaaacagaaagaggatgttacaaaaaggaatactgagaacaacaacacttttttttggagacagtctctctctgtcacccaggctggtgtgcagtggcgtgatctcggctcactgcaacctctgcctcctgggttcaagcgattctcctgcctcagccacaagagtagctgggattacaggcacctgccaccatgcccggctagtttttgtatttttagtacagacggggttttgccatgttggccaggctggtctccaactcctgagagttgatccacctgcctcggcctcccaaagtgctgggattacaggcaggagccgccgcgcccagccttacattgaatttttgtttctgacactgtatctttcatttttaagtgttcttggctgggcgcggcagctcatgcctataatcccaagcactctgggaggccaaggcgggtggatcacgaggtaaggagttcgagaacagcttggccaacatggtgaaatcccatctctactgaaaatacaaaaattagctgggcttggtggtggacgcctgtaatcccagctacttgggaggctgaggcaggagaatcacttgaacctgggaggcggaggttcctgtgagctcagatcacgccactgcactccagccagggcaacagagtaatactctcaaaaaaaaaaaaaaaaaaaattagaacaaacattaaaactacagtattatcaacaaaagttccccagagctgaaggacccaagcgtcccaatcaaaaagacccaccaaagaacattagagataaacaagagttccctgaaagcttccagagattttacaaaagaaaagtcccacacagagacttggaaaccatcgtggtctccgacttctcattaccaacactctcagtgtagacagcaatgcctccatgctttcaaacttctgaggaacaatgacttccaacctagaattctgtacgcaggcaaagtgccattcaaatgtgagggaagaaagggcattttcagccaggcatggtgactcatgcctgtaatcctgacacttggggaggccgaagcgggcagattccctgagctcaggagttcgagaccagtctgggcaacatggtgaaaccctgtctctactaaaatacaaaaaattagctgggtgtggtggtgtgcacctgcagtcccagctactcgggaggctgaggcaggagaactgcttgaaccgggaggtggaggttgcagtgagccaagattgcaccactgcactccagcctgggcaacagagcaagactctgtgtccaaaaaaaaaagcattttcagacagacctggttcaaaaaattcacctccgatgaattctttctcaggaagctactagaagattcactccaccaaaagatgaaagacacagaatccagaaaggggaattcaacagaggaaagagacacgaagaatccctgcaaggaatgaaaagcactccaaggaggactgctcagtagcaggcccgcaggacacccggcccaggctgaaacagaaaagtggcaggcctggaagggatgaaggtgataagattatgtgaggtgtttaatggaggagttctagttaaaagcctggcactaaattcatgactgtacattgaaaaccaagctaaagaaaattcggccgggagcggtggctcactcctgtaatcctagcacttcaggaggccaatgcgggcggactgcttgaggtcaggagttcaagatcagcctggccaacatggtgaaaccccatctgtactaaaaacacaaaaattagccaggcatggctgggcgcggtagctcacgcctataatcccagcactctgggaggatgaggcaggtggatcacgaggtcaggagatggagaccatcctggctaacacggtgaaaccctgtttctactaaaaatacaaaaaaaaaaaaaaaaaaaaaaaaaaaaattagccaggcatggtggcgggcgcctgtagtcccagctactcgagaggctcagacagaatggtgtgaacccaggaggcggagcctgcagtgagccgagatcgggccactgcactccagcctgggcgacagagcaagactccgtctcaaaaaaaaaaaaaaaaattagccaggtgtgatggtgggtgcctgtaatcccagctactcgggagactgaggcaggagaatcacttgaacccgggaggcggaggctgcagtgagccaagatcatgccactgcactccagcctgggcaacagaatgagcctccatctccaaaaaaaaaaaaatttactccatgggattattataagaaaagaaaataaagaaaattcactccaataacacaaaactatttcccttagtaaactgtatcttacatggcttagctgtgaagacagttacctaacaataagaatgcagacactgaattaccaatttaaacaaaattatataaacatatttggaacacagaaaaagagcaaggggtgaatgtgtttcaggcagtggagggacaatgtagaacagttctaaggcctcttctacagcagaagtcagcaatgtctaaaatggtaaaatcagaaattagcagtaccagcatgctacacagaaatatgaaatttaaggcaggcattgctaagcacccaccaatatccaaggatcttctatagtaacatcccacccccggcctgcttggctgaaggagggtgggatggccaccgtctcagatggtggcctgagggtgggaaaaggccacagccccggaggcctcttggagcaaggctgtccaactagcactgactgctgacacgtcaacttcacgtgagagaaatcaacctgattttatttaagtcactgtcactttgttctccattactggcagctaaatgtgatcctaactaaaatgataagtagaaacagagcagttaaaagtggtagtctgtgggaagttggagcgcggagcaagcgactggtagagggactgctgtcttgcactacaacccagtagtaccgcttagtttccaaaactaagtaaatgcattacattgataaaagttaaatgatgttaaaagaaaatcaccccatggggcatggtgggaagtgctgttaaccttaactttttttatttatttgagacaaaattttgctcttgttgcccacgctggagagcaatggcacaatctcggctcactgcaacctccgcctcccgggtttaagtgattctcctgcctcagcctcctgagtagctgggattacaggcgtgcgccaccagcccggctaatttttgtatttttagtagagacggggtttcaccatgttggccaggctggtcttgaactactgaccttgtgatccacccgtctcggcctcccaaagtgctgggattacaggcatgagccaacacacccggccataaccttaacttctaaagctaagattagatgcgtcttttggggtcaatttcaaattctaatactgaattgtggatatcagactttttattttaaaggcaacagaatatgaaggcattgtagttttggaaaggcagagtgatgaagagagtttgagactgatctggcagaggtatttaaaacttcaagtgggaaaggcattcatttaggcctgaggacctgagagctttacctaggtccctgacaatgagaatagaaagaaaaggctaaaataaaataaagatatttcaaagcaggcacctgcaaggaggcctgaggctgaccgcagtcctgtgaaggacagaaatgctggttagagggctgtttgcccagaaacggttagggaaaatgctcagaacctggtttacccaacctgagtggggagtgggctggagggcaggttaacatgacctccccaaattcctaacatagcggagcgcagtggctcacacttataatcccaacatttgggaggccaaggtaggaggattacttgagcctgagttcaattccaccctgggcaacacagcaagacctcgtttccacaaaaaataaaaaattagccaggtgtagcggtgtatgcctattgtcccagctattcaggaggctgaggctggaggactgcctgagcctgggaagtcaaggctgcagtgagacatgacagagccactacactccagcctgggtaacagagcaagaccctgtcttggggggaaaaaaaaaaattcttaacagttttccaacctatgactctgcaattttggaggtcagggaaatcatcacctaaattaacactgggaatcaccttacaataggtcccaaatgttctccaaagactctccaatccaaggaccgaatttgaatgaaattatatcattccattcaaatttatgtttgaatttctaattcctaagaaaaacaaaaatccaaagaagttctctattacacatcgattttttgcagttttaatcaaaaaacaattttgttgccactgttacctaccaatcaataaaactaaccaaaaacctaacccccaacacagattgtttaaaatcaaactgaaacttgacctttatctcccagttagtggctagtgtatttggggcgggggggcgggagattactacacgcagttcacattgccaaaacacttctgattttagatttaaggagagggtgtttcctctcatccattctcattagcaagagaggctttctgtgagcttctcacacaaatttaaggtaaccataacataccgtcatcccataacactaagaatctaagaaaaaaacaaacgtggtcaaggactaataggtattatgttatgggttttgggatgagattacatggtaacattgtttttagtctcttccagctaaaaaaaaaaaaaaaaaagctttgtctcttttcagagaaaagcatttgacagtttcactgtatttaatatagtttggaattaacagtcctgtgtgcctgcctgtttatccagtatcactaatgtcagcgcaaccaggagacatctaagggcacctggcttgcgacaagaggcagggcggaggcaagcagaggagctctctgtcaaccctgcagtgttgtgagttctgtaatttacatgcatttgagtattttgcctgaagggcaattcactgcacattttaaactttttcaggtagctcacacagtggtatcctgaagtgagaactatttcttcaaatccaattttatttctttgaagtctagatttaagagagacactgctgctcactgtgaagcccaactgtcatggaaggaagaggttttttgttttttttttggagacagggtcttgctctgttgcccaggctggtgtgcagtggcgcaatctcagctcaccgcaacctctgcctcctgggttcatgagatcctcctgcctcagcctcccaagtaggtgggactatgcgtgccaccacacccggctaatttttgtatttttagtacagacgggttttcaccttgttggccaggctggtctcaaactcctgatccactcaccttggcctcccaaagtgctgggattacaggtgtgagccaccacacccggcctgaagttttaagacagaaaaggtagggctgggttgttaatgtttaatggtttcagctgtcctatctcatgctattatagtcagtatcaaacagctaccatagaatctacatgatctaaattaggttaaactaatttttatcatgcaatcctaacatttccctataattcagatcttactcaaaagatctatttcttaagtctgttatttttaaaaagtgttcccatgttatgcaaatattctatccagagaaatcattaagataaaaatgtatttgagccgggcacagtggctcacgcctgtaatcccagcactttttattatgagatgtttagcaccgtgtcagttaagccttacttattaaattcggtggcatcatcccactcacaccttgggctggccattcccacactaacagctatgggcattcacatccatggaggaggaccgtgagaagatactatcacactcatggtgagaaaagccacaaatgaggaaccacccagaagactaggaggattaattctattcatgaagaggaagcacatctcgagagaagatgcccggactggggactggaaacccacggtccgcctctgtgacaccagcatcaagcctgaggcctccctcctggtctgacggccacacagcagccagggcagaggaccactgtggcctgtccaatgcccataggctaggatttcaaacatcagctccatccaaacgcaacattagctgttacaaataagctgtgggaaaaatatttaacacataagacagtatttgtatatgacaaagatgaaagacaacaaattcatctcactgggttgtccgtatttgttgctatttacttttggaaactgtaaagtgtttcatatgttctgcttcaaatggtatcaagatattttcaaaatagcttaaagaaatatacatgcaaggccaggcgtggtggctcacgcctgtaatcccagcactttgagaggccgaggagggtggatcacgaggtcaggactttaagaccagcctggccaagatggtgaaaccccgtctttactaaaaatacaaaaattagccaggcgtggtggcaggcacctataatcccagctactcgggagactgaggcagagaattgcttgaacccgggaggcggaggttgcagtgagccaagatcgcaccactgcacttcagcctgggcaacagagtgagactccgtctcaaaaaaaaaagaaaagaaaagaaaagaatacacacgcaaagctgggcattaaggttcaagatttcatagaggaaaccaatcaagctataggaaaattaaagacaaaaacctacaatgaaagttgaaatgactcggccaggcacggtggctcacacctgtaatccaagaactttgggaggccaaggggggcagatcacgaggtctggagatcgagaccatcctggctaacacggtgaaaccccgtctctactaaaaatacaaaaaaattagccaggcgtgatggcgggcgcctgtagtcccagctactcaggaggctgaggcaggagaacaacgtgaacccgggaggcagagcttgcagtgagccgagatcccgccactgcactccagcctgggcgacagagtgagactccgtctcaaaaaaaaaaaaaaaagttgaaatgactcttgtcccatgcgaccactgtggcaataagaaaatatgagccaaaaataatcatattttatttatttttgagacagggtctcactctgttgcccaggctggagtgtagtggcatgatcattgctcattgcagccttgacctcccaggctcaagtgatccacccacctcagcctccagagtaactgggactacaggtgtgcgccaccatgcccagctaatttttatatttttataaaattttattttgacatttattatagatactgggttttgtcaggttgctcaggctggtcttgtcttcctgagttcaaccaatcctccaccttggcctcccaaagtgctgggattacaggcatgagccactgcaccaggccataatcttcctttaaaacttaaaaagtttactacctatactttccaaatttcctcacatattccccattaagcctccaaatctgggctgaatcagctacttttcttccttaagtttcaagaattctccataattgtcattagatacctggcaagatttgggaagtggggaaaggttggcttttccacgtgacaggaatcgacatatcagaggtttcaaatgtcatggagtggtgaatccaaaaactgaacagtccactgatggacagcctatatgtgtttcctgagcagaagtaattccacttggaagttagagtacctaatattgctctataaatagttttattcaaaaacattattctgtgctttccaatcgaaacaaccaggcaattccaagcaacattaaatactaactgcacacatgttaactagaaatacaccactttagagttacaatgacgtatatgttaacataaatgagtttaaatacttgtaaaatatattgatatttcattaaaacaccaccttctaagtccattcttccctataattgaaagtttatacttttgtgcaaactgagttcctgagaataatgtagtttgtaatcacaatttccaaagagccagaatacaactttgaaaatatgtctatgttacagcacagttcccgtttagatttggaaaggccagatctcataaaatatgacctccacacatgctgacaagagcttcctccagggaagcccaccagtaatgcctggtggagagaggtggctgcacaatggcccccagggcccccgccctcagactaatcttctaggtcccaggccagaggccagtgggaccacatcttcccagcaaaaccaactttccctctgcttcctcttcccagtcacactcacaggtggtgcaccaagttgaacctgacagtggaactgtgtgggtttcaagatcgagtgatcagaaaggaacggtaaacaagctgggtgcagtggctcacgcctgtaatcccagcactttgggaggccgaggcaggtggatcacccgaggtcaggagtacaagaccagcctggccaacactgtgaaaccccttctccactaaaaatacaaaaatgagccgggcatgctggtgcgtgcctgtagtcccagctactcgggaggctgaggcaggagaattacttgaacccaggagatggaggttgtagtgagccaagatcatgccactgcactccagcctaggcaacacagtgagactcgtctccaaagaaaagaaagaaaaggtaaacaaaatattcagattttaacatgcaccaaagacctcactttcaaagcaacggtgaagtcaattaattattcagttggaaatcgtgtcactgacaaaggacgctagaaagcaaatactcttaatttactgatactataagtaaccaagaatggtggttcccacggaaataaagcatcacaggctgtccttgatctcaggacctctttctactgctgctctcacaagataccgtgtaacatttcactacagagtaatccaacagaagccctctaaagaatattgcaacttaagttttatttgtaaacaaaattccaaattccagtcaccaatctggcagagtagagtaggaggcctggaggcctcactgtggaacactttcatttgtttcttcgtataaatatcagctttatcagccccaaagattagaaattactggttcgaactgaacagtcctagcccagtgacgcaaatgacccaaggataaggttttcataggtttggcctgaacatacgcatttcctcctcctactcagtggttttaggtgagacagtctgagggtcttgaccggcacacccgttagggagagatgaagtaaaagagtttcacgctgcacttttacctgtctttaggatcctaattatcgttaaatggtttaatcaaatttttgtcctaaaaaagcataataggttagctgaccaatgattaaaacattatagatccggaacgaactagagaaggcatgcaaaattcagatgagaaagtttctaagtgatagctccagctacccctccaaatatcacaaaggtctagcagaattggaattaaaaaaaaaaagtcctcttgcacggtttatttaaaataaagccttaaccttaaaattcccttgaaggtgttacagcaaagtaggtattcaggctctgaccaacaaggggatgtagacaggctgtcacccaggaggggccgttagagctgggctccctggggatgcaagggggtcccacggggcagtgggcgaggcagatgcagaaagcacacccagctgcccccacaacgcagagaagcgtggggtggggaaagggaactaattccacactgcctccggaccccaaaggcgaggtgcgggggcgggggcgggggcgggggcggatatcccagtgagtgctgcaggaaatgatatccagactcggagggtggatctaggaagccgccagggcgagggcccggcgggggggagggggtgggagtgggaacgtaggatgtggctccaaggggcaggatgagggggcgggacgatcgaacgcggatgtcgagcctagggagggcaaggagggatgaaaagctagcggagggacgagggtgcaaggagcggctggagagagatgggctgcgggcctgggggcgctgccagagcgagaggaggcgaagcccacgagctgggtgggcaggagggcggcagggtctgtccgggcggggatgggcgggcgtggggatgcgcgggctggggcgcgggggtcgcagagccgcaggtccggccctgccggcgcgcacttaccccactcgaggaactcggccacgtacttgtcgcggcgcagggccgagtggctgcactcggtgtacaggcagacgagcacgtcgagcagcgtttccacgctcagggcgctctcgttgcgccagggcccgtccaggagcagctgctccagcttcttgagccgcaccttggccgacatggtgccgcgcggcccgctcccgacgcgccggcctctcaccgccggctcggccagtccgtcagggcgcgccctcgggggctcggcggctgcgagccccggcagcagcggcgcctcctcgccgccccgtccgcgtcgtcgcgccccggcctaggccgacatcttgggctccgtcccgacggcgcagagtctggggcgccgggccccgcgggtccatgggccgctctcctcccctcggcgccgccgccctcccagctcgggcggcccgcccccgccgccctcagccccgcccgcggccgcgccctccccgccgccgccgccgcagactaggagcggcgaggagcctagcgctgcgcaagcccggccggcgcccgagcccgaccccagccccgacccggcggcccagccccgcggcccgcagccaaccagggcgcggccagcaccagcgcagccaaccactacggggccggccgccgccgcgctgacctcagcgcgccgccccgccccgcgcccggctccctgctcccggcgggctcgggcctcgccgcttgccgtagggagccgggatgctgggaaggcagggccgggcctggggagcggcgcggggtgggggtggggggggcggggcggggcgagtgggccgctgagattgcggagcccgcgcatgcgcagagcgcgcctggtgggcgtgtgcgccttcgccctgcggacccggtgccttcagtattcggggtccgaccgcgcgcgtcgcggatcccggggccgaagacgaccccaagtatcggagaggcagagtcgcgatctcaggccgtcgagccccgtcccgcagtccgcgggcccatgttgcctgcggggcctcggacctgcccggccgaggtgggggtcgagggcggcccggcaggcgcagctctgatggcctcggcgggttgtgggctatttaaaacggcttgtcccagctcgaagcggtcctggaagactcgggccctacccctgactttaccgatgagagactgaggcccagacggtgtggggtcagggcccaggcttctgggggatgctgccaaggcgggagccagcgtccccagtgcccggtggattcgtgatggcttgcagagggtttcagtttccactgtccagccctccctgcagaccaatgcctaggtgtgacagtttggtaggaaaggggccggatatttgtctccaggctgggtttgcctagcgagtcgctgcatttactaagattgttggttaatttgggtggctgggggagggaggctgatggagataccccccaaccccaacaaacccttggcgtcaggagaggaggggcttttcctggagcttgcggaaggtcaccgaaatcgtgggggtatctgagagcttctggggcgcgcgggtgcaggggaaggggtcatgcttccgtggaagcggtggcctccaggtggagccgatgaaggggcagataggggtttgaagcaggacgttaagggagcctgaagcaaaactaatctctggagctaaaaataggagtgggcctggcgcggtggctcacacctgtaatcccagcactttaggaggccgaggtgggcggattgcctgagctcaggacttcgagaccagcctgggcaacacggtgaaaccccgtctctactaaaatacaaaaaactagccgggcgtggtggcgcgcgcctgtagtcccagctactcgagaggctaaggcaggagaattacttga

SEQ ID NO: 98 - DNA, 691191 bp, Homo sapiens
  source 1..691191: mol_type = genomic DNA
tcgagtgagtctaaacctccagccatgtcaactggtaacctctccttcttcggctaggtggggagtgggacaaggccataactgataggagtccaggctggggcagattttgtgtctcctgactagttccatagttaagttgcaaaaccgaatctcgccttgtgctctcggatgtagtgcttactctggtcctctggggttatctaaaatctggtttccttaagcgtaaggcagagctctaaccgggagaccaccctgcccccaagggtgggggttctgggagggagagagggaagcggctgctctgtagctttctctactggcttgcccaagtggactctgatcttggagctcaacagtgtcactcaatcttccaccctctcctttgcaacctatttcttaaaccagaactaatgtattctggacacagagtccctgaaaccccagacaaagaaaattcgatgtatctgaacaaacaaaaccgcgtttctttaaatctccaagccaaaaggaaaagtgcagaaacatttactcactgtccgacctgtacatatattttacctgataacccttaaagaagtgccccccagttcagccatcacccatgcagggcaaagggagctggagctggcccagcctgtcggcgcagacactcctgacagctcctgtctgggcacttctttctttcttggagcttctaatttctttcttggcttctgaggcctaacagggtgttttgatgcacacacaggaattactaccgtccccaatcctagggtacatccctagcccaggccagggctttgagttttcctaggagcgggagggtctgcaaagccccacaggctgaaatctcagcgtggccctctgctcatctgctccaggtggaaactctcacccctgagctgcccgacctgggttcaagcccgggtcaggggagttagcaaggagacacctgaaaaataaaaggacagaatggaagtgcacactcccaccgcgggcccgggcgggaagtcggactaagaccgcggcgggaccgccccatccagaaagggtgccccgggtgtgggggcggaaaccccagcgctgtcttcagtctccacacccgcgcctttttcccctggaaaacgagcgtccttggcctcttcggccgcaaccgggcggctccagacgtccaggagggcagaggctgggctggtgcggcgcggggggcgcgggcgcgggctctgcgcctttaaggcccgcgtcggcagagcgagcgcaggggccgggcggcggggcggggcctcggcggggcggccgcggcttcacctgcagctccgagcgcgcggaacagaggcgcgggcggctgcgaggccggcggacgcaccggcccgagggaacgcgccgccggccggacttggcctggctcccggagccggggcggcgagcgcggcgggcgcagcggggctggaggctccgggcaggcgcgggggagcggcggcggcggcggcgatcggagcggcggcggtggtctcggcggcggcggcggcggcggcggcagggagcgggctcccggtgccgggcaccgggcgggcggcggggaagatgaccgcgggcgccggcgtgctccttctgctgctctcgctctccggcgcgctccgggtaagttgccgcctcccgcccccgccgttcggaagccccgggcagcgggaggtcgtccccggatcccgcggggcgctcacacacccggcggggctctcccgggctcccccgccgcgctccccgctgcatccagcccggcgcccgcgctcggcgaagctgcctgcggtcggcaggagcgggaagccgcctgggcagcggggagcggcggagcagggtgggagtggggctcggtggaggacccggggagctccgcctgcaccggacccgccgagcctccctcgaacgcccaaagcccgtagccgctacccggagctcggcttgcctgcatggggcaggcttccactggcggagccggcgcgccctccatcgcccgggagccgcgcgccgcgggagttgccgagcccagccccggccgtggctgaaggcgtggggcgcccggcggctgcgggccagggatccgcgagtgcggggcgcctgcccgacctctcctgcccaaggcctgggggtccgtctagcggcgccgctcagttctgtgggtgccggcaggacccgcgctgcgggtgggcggcggggtaggactgcggggcactctcacccccgagccctcggcggggctggagcctgcgtgtccggcggggccccgggggctgggagctgggccgggcttgggccgggaagccggacgccgggcgggcgcggcgcgggagggcgccccgggagggcgagcgggtctcccgctgcctctgcagagccccgcgggccggattgccagctttgctctgcgcctggcgaggtgcgcggcccgcgggggcagagagcgcggcggctccgggggcgcccctgggcggaggcggaggggcggcgggagttgcaggaaccccctctcgtggccgatcggcctcgctgccttctcccgggcagcgctgttgtaacctcggaaataaacaagtgccagcggcgggaggcccgctccgaggccgcggggcgctgggggacgcgctgggcacacgcttcgggcgggcggaaactttcctgggcgagttgagcctcccaccgggctgcgggtgcgatttggagcttcgtggccgatgaagaaagccgcggtttagagcttttcgtaaggaatgaccctgcgtcccgctctcctccctcggtgctgggggtagaggggcgccctccgcggtgccggcgtcgggaagcctggagctccgggctgggggcggcctccggagtcgaagcatgggcgggcgacggcagcgcgcggagctggaggaggcggcgggcgggaggcgccactgcccggtgcgggctgcacccgaggcttcctgcgctcgccggggagccaagcaccgctgtgctcctgctccttcagcggggctggcttcccgcttgcacacactgcctctccctccaccacctcctcctgcctgtcacgccccctcccagaagcttggtcggagggccctgtcgtccaccccatccttccctggccctgtgccatgggctctagacttccccactgagcaggaaaggcgagcgagctccggaggacaggaggagaccccctttccggtcagttaggggagccgtctccctgcctgggctggagatgggggctccgagggtgaaaatgcgggctgaagactagaaggtggaagcgcccccactgcctcctcaccccagccaccggcagcctcccgcagagctgccttcttcgaccggctccggacctagtcctagagaatcttcttcctttctctcctctttctcctccctcccggtgacctggagaggagacaagaagctgcctcctccgccttaccaagagcgcagagcggtgggcctaaagcgcgaatggtctgagcagagccgcccacactttggcctccctgcccttagtggcttcgggagcagcggctgaagtcttctgtctctgccttttggtcatttctcaggcgtctcctctgccaataaggccctggccggcctggcttccccaacagtccgtccttcactccctgcctgctgtgtgtggggctggggaaggatgctcctggtctgtagcctggagagtgctccctaaagtccccagagagcagaggagcagacggggtatcgcgtctgggtggagacggtggcctgccagcctttctctcttagccagagaccttttacacagcaggccctggatgaatgttggttggattaaatttctgtgaacttattgttttacactctcccctttgtgttctcaggcccataatgaggatcttacaactagagagacctgcaaggctgggttctctgaagatgattacacggcattaatctcccaaaatattctagaaggggaaaagctacttcaaggtaaggcggggtgtggaggggtgggagtgaattgctgccatgcttttccttggggaaacatgtagatgggagaggcaaggcttgcctcatctttgtgctctctgtgaaatgatggtggtgaagtccacgaggtgcaaattggttgacctgaaaggcgttttgcataacaggtgaatgattcagaaccccggtcatttttgagtgaagtgaatcatttcctgggcagcaaactgtaattcggatgtaacatcacccaaatagtgtgcagagagagaccttcttaccaagtatttttatgcatgaagttctggatacttaaattatccctgctttgaaatgtatgataaagcagacgatgttgttggaaatgcggtaaataagcccacagacggtctgttcacaaatgtggcattcattttcattactgccccactgacaacacgaaaacacacatgcaggagggaactaccaattagctttatcgtaattgcaggattatatccacacttgtgatgggaaagtcagagacagcttcaaaactcagatgacagtagatcatcctgcttattggtctgtttccctttcaagacaaactaattagactttatatttgcataggaggggacataaatcagttctgtgccatgagcaccttggctgtgagcctttcctctctgcatcagtttcctggaagtggcagcctttgaattgatttcaaagcgatagaggaagaggacttttgataaagtatcgaagctaaatttccacattcaggactgttgactgccctaccggttttgtgtcccagggaatgtaaacttttccctccagaactgacagcggttcctgtgtatgtgtgtgtgtgcatgcatgtgcgtgaactcgctcacgcttatagtgaagtgatttttcagatcctcgcccttcaagacagaacttgttgacgtgccttgttgattcctggttatgtggataggatttttattttgcaccgaatccaagttttctgacttagtttttttatctaaactgtgatactactgactcattaatcatcaaaaaaataaaaaatctctaggcagtcggcctaggagcagaatagatgtgcaatctaacagggcatacatagtaaagagctttcaagagctactctgttaattgcactgtgtatgtcactttggagttagaacgggtaggccattttcaggatcgtttggtttactgagaatctcagtggactcccagagaaggcctgaggggatccttcactctcagtgcgttggacggtctcttataactcgtggggcactgactgcagtctgctgtgtgcatgtcctgctgtgctgaaactggcatccttaagttctctgattatgtggccaaatatgataagaccttggagtatccattttactcaggcacttcagaaaaatgcctctctttttattaataaatactgcttactacagaagagaatgacaaattctcatgctttctacaacgcagcgtgagatttcaaacaaggatctcttccctttcatggtgtgttgtgtggggatatctgctccagtggtccaggccaaaccgtgctgtgctcttgatcagtgtggtgggaaagcctagatcactggccggatgtcggcctggcccctgtgcccaggtggtgttcgcctcgtggggggccaagagtcacatgcccctgggtgaatctggaccagctcagacattgtgtggactcattttccaagtgcccgttgacttacgtgtgcagcccagcccagggctggttcagggaagcattgcagagaatctcccaagcacctgagcatgctgggtcctctctgaccctcctctaggggctgtagtcgcattgcttctcctgcgcctgtgtgggtccccttctcactgttttcttccactcgttcttctgaaggtgtagagtctcaggaagaaagagatgttttatatcttacaaataattttgcacatatggaggcaagagctaaggctgacaggcactgaaacgagggcacagtgacatttctctctgtacgcagagtactttgaaactacaagaccacagtgaggaggcctgtgtgaagaggaaacaggaagtgtggtgtttctgttattctggtaggaatcaagttaaacagataatgactacttataattgagttattccagcggagagagcttaaccttaatttgacgagtgaagcttcacagagtggccatgttcctctgagtaggccatgagctatcagcgactgctccgtggctccttctctttgcctgagtcagctcacagcagccccaaacatacagattccagcaggagcgatttgttacacggtaattaacttgtttatgataaatggatggaagaaatgtcgtggcattttgttttatgtctaaatgaaaagcatttgcattctaaaaatttcatgctaattaggctggaaatagttttccccaatagggtagcaaatactatgtattacgaaccttccgagaagcggagccgcgaagtatggaaatgcgggacttcgctgctgatcggagccttccgagacgccgctcctgtgtcccctgcctgcgctttttctggagagcatttgaatgcaattgcatatactcttatgctgtacttttgtttttaggataattcacttatggccctgatcactgatgcatggccgtatctaaaataggacggtgaagccgtttgccttaggctaaaatgcagtgttctctaaaccgtagtttagtctggggtgatggctaagctggtatctttttctctgctttgttaataattaatggccagcccgcccggaagctgcagcctggtacggtgacctgcattgctctcccgcgtggtgggcggagtctaggcacacccagacccgattcataactcgtagaggcgggagagtcctaggtggcatagtgggaaccgagggctcccgggtcgtatctcccctctatcctgcaacgaagcgggaacaggtgagtggaaacgctgttcactggggatggggcggagcctggcatcctcagattaacatgggtacactatgggccacagagtatagaaagaggagcttggctgggtgcggtggctcacgcctgtaatcccagcactttgggaggccgaggcgggtggatcacgaggtcaggagatggagaccatcctggctaacatggtgaaaccccgtctctactaaaaatacaaaaaaattagccgggcgcggtggcgggagcctgtagtcccagctacgtgagaggctgaggcaggagaatggcatgaaaccaggaggcggagcttgcagtgagtcgagatcgcgccactgcactccagcctgggcaaaagaacgagactccgtctcaaaaaaaaaaaaaaaagaaaaaaaaaaaagaaagaggagcatgtttctaatgacttaacgtgacgtcctcagcaaagccttgcctctccccgtttctcagttagtttaggaccatcttgtgtaccctcgtaccaccctctgcctccttactggagaacttacattatctggccaatcatctctcttacttaaactctctggtttctgagggtaagagctctgtcattcttatttctatttatatcatttcaggatgttcttggccaacagaataaaacccaattcacataatcttaaataaatgggagtaaatttttcttacataaccgtgagtgcagacataggtggtcacatgctggaacagcagacaagggacacggtcatgtgcctgcctaatcctcttcttccattctgccatctttagtgtgtcatttagtgcctcgtcactgcaaactggctgctgtggttccagtcgttgcttctgagttcagagcagaagaaggtgcagatagtagcaccatctgcatttcttccctgtaccaggaagacaaacactttctcagaatccctgcagaagttttcattgactaggtcacaggccactcttagctaaactgatgggggtggagcactgggaatgcagagaattgcattgtcatgtgtgtcttagatccattataatccatcacatggtaggtgtccaaattgctcgtctcagaacagaattggggctttgttttaggaaggaagaaggagggatggatgctgagtagaccttccccagtgcccagtgctgtacccgaagcagagttgacagacagtgaattgctgaatgagtgaatgactcatttgcatacaaaggcattcagacagaggcatggttgaagagagatcagatgcagtgtctggaatccatatctaagaatctgccatttctgccacactgcatggccagaagtactattatcttgtctttacaagtaggttgaagataggctctttgcccatgcagtttggtttgaaccacctctgcatagataggcaactcttccagggcagacacatgctagatacacaggcaagaatgtcatcccatctccctgcatagccgatgtccagcaccggcctaatgcatggtggctgtgaagtcagtattagtcaaataaagtaatgaatgagccggaaaatactgacactgttcgtgtttccgagtcgctttggttaactcacagcagacagggagctgctatgaatattcccataagtggcactaatgataagccaaccacatatgcctggaattattagacactggaagttgcctgtccagtattgattctctctctctctctcccttgccaacaaacctcatctgtgctagtccattggctgacaatgtgccctgtttaatacacctctagactcatttacaccaatgtggcaatgtggcttctttctggtcaccggtatctaattaggttagtctattaggttaggctttggggaaagctgtttttattcttgataacaaggaacaaactgagctggccatgccttccaccctttgctcttacttcttcctcctacctggaactcagatgtgatggctgagggaaagcagccattttgtgagtttgaggatggtggaacacaaattgggtcccagaaggcatcctcaaacaatggcagagccctggactcattgtctcctgagtggtgagaaaaataaggtcaaaacaccacgcttggttttgttgtcacatgcagcctcgtgcattccctgacttaggaaaactgcacactagcaaagtcaaactctgtcctgagcctaggttttcaggctccctctaccctccagtgttccttggaccttggccacttgctcttgctttaaaggccctcctctgctccttttgtgaattgatgtctgcacctagcacactggattgcagagagcatgtcatgaatacttggtaactgtttgttgaataaatgaacagtcactactccacgctgtcttatgcccaggagatgaaagaacccttagatatattaagccgggactatctgaacccccaccagagaatgtaaactctttgctggatctcatagtgatgcttctccaggaagtcaggagttatgtattgggggttttgcctctggtcacaatatctactggttctagggaaccttggtctctgtagcgaagcagaattatgtgaaggctgggtgggactcagaccccactggtggcttgggtgagctcaaagcccagactttcttgctgtcaaagtcagaggactacttctttctgagcacccagacccccactgcctccatgggtggtcacttcagggatccccaaaaatgggcacgcagagcccatgagggagaccgtgggatctctttggccatctctgggggtggtccttgccttttcaaggggccgttattgtttgaggtttccagcagcttttccctcttatagttttgtctggtcccagggttaagaggttcagaaagggaagtatatatcctgtctttagaaagtggttgctatcagataaaaggtaggagcggcccaggaataaagcacagaaagcgctgcatggtgcatcatctgcaggccaaatcccactctgagagagggtcctggtagccctggttagaaataaagcgaggcagaacactgccgccccgggctctgcacagccacttgcccctgtgtgcagctgcttctcacagctctgccttccatcgcaagagggagctgtggtcagtggccctgctgctacccaggaggaatctaggctcaaggaggtggccacacctgccccagattcctaagtcagtggttccttagtcagtgattcctaagtcagtgattcctaagtcagtggatcaggattcccaccctgcaagattcctaaccgctgcttctctatgctcactgccactaagcagacccccttcattgtagaaggcagtgcatgcaccagctacagaaatgaggatgtgtgaactcactgacgctgtgacttaaagattcaggttttgcgtttgagaaatatgtgttttaatgagtcttcagatgagggagcatgaggctttgcagaattataatataataacattatgttctgtccagtccttggtatacgatatctcatttaactttcacaaaagcccttccagggaggtaaaattgttctcattttatggatcagtaactgatgatcggtgagttctggagattggcctaagggtaggagatttgctctgttttccctctttgtgcagtcctaggcacttagctcattcctatctccaaattaatgttaaagaagatggttttagagcaccactgtcacgtgcagacaggatcggacccagatgttcagggccacagccataagaccagcagtgaccaggcacacaggtatgtgcagtaaacagaggccctcagtgtgtcagaaagtgcttggttgcagttgctcatgtataaggctcaactgaagtgggtctaaactctcgacaccgggggtttgcaaaaccagccctgggattagaagagcccgcggcttctgtgatgccagtgggagctttcaattctgagcatgcagcgagcagtcccagagccgagctctctctcggattttagactctgccagcgctggggaagccgggcagagagggagcagagagaagagtccggctggtcctggaagccctgagcacgttccatctgagctgggtttatgcacggatccattgttgtcaacactcacgttgtgacatggggcaccaggaaccttagtgaggccggttacagattgagagaaagtgccacgactgtgcagctggccagccggggcggggctccctgacggcctctcttgagctgatgccgtgagagctggtcctgaggctgccgtggcctttctgcccatgtcggggtcctgggtgtctgcagagatctcgtactctaagctgagagagagcaaggtgcttggtataacttgaaacagtctgaagatgtggtgctttccgaggttcacgtgggttcccgttttctgccaaaaccccttgcggcgaagcccctttgcacgcttttgcctccaggggtggccttcctgggcgcagggtcacttccactctgggactgcgtggcgactgggttggtgtaagcttccaagacctgtggcttctttgtttcagaaataatgatttttctaattctaccctgcagtgttaaaaaatcacaatgaaattcataaccaagttcaaaggaagtgtatttggtgtgtgcatccctgtattgtgtgctccatgacactaatttcaaaatgtggaaattttgtgacttctcttatgttgcaaatggaggtggataaaggaaagggctttttcctccttacctccttacctcccaccctccttcctccttccctctctcctccctccctccttccctcctttcctctcttccctctccccttccctccccttcccctccctccctcccttccttccaccctctctcccttgctctctccctccctcccttcctcctttccttcctttcttttttctttgaaagctgggttaagtagatgccaggactaatcatgaactgagagagagagagagagagagcaagcaagcattcatcttttcaaaaagtgtgcctattattctgactttttgaagaagtaatttctcctccaagtgaattccactataaaaaataccataagccgaatgaagcttctttccgtcaagggcggtaaagttctccccggtgtgttcttgtaaaacctcatggcatttgcaggctccttcagtccccagagtgggactgtggtgtctggcaagctgggctggtaaaatccttggtttttcgtcaaaaggctcagaattttggtgcctttttgcccgggctctgggctgccctctcctggtggcctccggtattgtctctggctggtgtctgctttcagttcttaaacaaaagagaacaaaccaaccaaaaatccctatttaattatctttgacccagtatgtgctccccgaggccattttcctggcaacccccacatcaggggccaggaaggaggggaggagctgttgtttggggggacttaccatgtgccaatgtgtcttctcatttaacgctgtcaggagacctgcagcctaaggtagttagaaggcatgccccagatcactcggtatgggcaggggactttgtctgtatgtttttatctcccacactgccttttccaggaggaatttacttagattacaaattgtattattttcttattgcagtataaatccccacatatgtagcagcttaaacaacacaaagttattatcttgtggttctgaaggtcagaagtccagctccagtccctgtgctgaaatcaaggtgtctgcagggtgggttccttctggaggctcctggggagaatctgtctccttgtgcctcccagctcctcagggctcctgcactccttggctcctggccgcttcctccgtcttcagagccagccgtgaagcatctctgtgccgtcctccagggtcattgagggtcactggtcacatccacctctctctacatccttctcttccacttgtaagaatccctgtgattaccttgggcctccctgagtaacccaggataatctcccgttgcaagactcttaattcagtcacctctgccaagtccccactaccacgtgagatcccaggctcacagcctccggaattaggatggggacatctctggggagtcgtgattctgctgaccacatgcgtgtctgacgacagagcaatcctagcaggtgtgtgtgggagtttcccactggcttccgcacactaaggacttgctatgcgtcccacactgtgcggtgaccttcattcaaccctgcagaacccagtggttccttcattcagtcctacacatacctcagtggttccttcattcaatcttacacatatctcagtggctccttcattcaatcttacacatatctcagtggctccttcattcagtcctacacatacctcagtggctccttcattcagtcctacacataccccagtggctccttcattcagtcctacacataccccagtggctccttcattcagtcctacacatacctcagtggctccttcattcggtcctacacataccccagtggctccttcattcaatcttatacatacctcagtggttccttcattcaatcttacacatacagtggctccttcattcagtcctacacatatctcagtggttccttcattcaatcttacacatacctcagtggctccttcattcaatcttacacatatctcagtggctccttcattcagtcctacacataccccagtggctccttcattcagtcctacacataccccagtggctccttcattcagtcctagacataccccagtggctccttcattcagtcctacacataccccagtggctccttcattcagtcctacacataccccagtggcttcttcattcagtcctacacataccccagtggctccttcattcagtcctacacatacctcagtggctccttcattcagtcctacacataccccagtggctccttcattcagtcctacacatacctcagtggctccttcattcagtcctacacataccccagtggctccttcattcagtcctacacataccccagtggctccttcattcaatcttacacatgtctcagtggctccttcattcaatcttacacatacagtggctccttcattcagtcctacacataactcagtggttccttcattcaatcttacacatacctcagtggctccttcattcaatcttactcatatctcagtggctccttcattcaatcttacacataccccagtggctccttcattcagtcctacacgtacctcagtggttccttcattcaatcttacacataccccagtggctccttcattcagtcctacacatatctcagtggctccttcattcaatcttacacatatctcagtggttccttcattcaatcttacacatatctcattggctccttcattcagtcctacacggacttcagtggttccttcattcaatcttacacagacctcagtggctccttcattcagtcctacacatatctcagtggttccttcattcaatcttacacggacctcagtggctccttcactcaatcttacacggacctcagtggctccttcattcagtcttacatggaccttagtggttccttctttcagccttacatggacctcaatggttccttcattcagtcctacacatacctcgcaatcttacacagacctcagtggttcggggtggcatctccacttcactgttgaggaaactgaggcatggagccattgagtgacctggcatgagctgtgggtcagggaggtctatctgaaggaatgctccagcacttagccacagcccactggttctcagcccgtcctgcctggctccaggagctcctgccacctgccttatccagtggctataattaggactcagaggggcagtgtcccttgtgggtcctgaggtggggatttgctgctttggaactccacagggtgaactgcctgggaagcccatagcagcttccgatctgggcccttctaactcttcctcgtttggattcactgtgctttcctgctgagagtatgtggggatttagggaggattaaggtaagccttccatgacagataaatatccacagggccccagagtgccgcccgcaccttgctaacaggaagctgatccttgagagtttgggtgcttcccagcccaggaaagatggccctggtacagccgcaggtgttgagaggtgtgctttctcctggaatgggtgcattttccatatggagtatgatttaatgaatttccagccccagagtgtgggtattggacactctgtctctccccaggggaggacctagctctctttgtctctggagaaggcagaggagaaaggcttgctttccaggcctcttttcaggagtgtgcccttgggtttctgtgtctgtattggagaaatgttgacattttttgctttgcgtttgttctggccacccaaatgtgagttgagatgccatctatattgatgtgcctagaaaagcaagaaggaaggttggtgcatgagtttgctaggtatgaagtccccgacttccgcttccaggaaggtccaaggagaaacgcaggctgcagcccccgatagggtgcagagagatgctggtggggagtctggagagggatgaattgggtgagggcccttccttctctggacctcagtttccctgtgcaaagcagaggggtaagatgtccaactgtggtccaggaactccctgcctggggggtgcttgctaaactcgccagccccgtgggtcctatcccagacctactggagggtgccgacagtggcccacaaaggatccatccacgcagagcctccaaatgtaacattatttggagaaagggtctttgcagatgtaatcagtttcagaatctctagatgagatcatcctggattacctgggtgggccgtaaatccaaggacaactgtcttgacaagagacagagaagacacagacttggagggggaggccccgtgaagtcacaggcagagattggagcaatgcaaccacaagtccaggaatgcctagagttcctggaaggtgggaaggtcaaggaaggacactcccctagaatctgcagagagagagagcagccctgttgacactgggatttcagacttctggcttccagaactgcagaagaatacctttctgttatctgaagccaccaagtttatggtcatttattacagcagtcacagggaacgaatccacccactgaactgggaatcctgggactgtgacctgggactctgctgtttctctccatctcccagggaatccgatctttgcgaaagcatcagggcttcaggcttagaggatgtttagcctccgattccccaggggctgcatcccttgagagaaaccgtgttacctgggaaggtgtctgccgaatgtaaccagcatctcaaagtgcagctcaggtgggcggcttgaaacagtgctgggtgtttccatcccaccagaaaggcaaatgaggcactttagtgtagtaatggggtattttatattgtaaagcatgacatggaacaatttcattggaattaaaatgtatatggaacatttgttctccacccattatcttcctctatcaaatggaatcttaacaaggattatagctcagataatatcacatagatatactgtaaatattttgttaatctaaaggtctgcgttggggaatggatcgttcaacagagacagagaggagaggcacactccctctgctgatgagatgtggagggatgcagagaggagctgggcactctctggcgtttttagaacatgcctcttctctgcccaaaaccgctttactgtggaaatgcaaaaatattttatttctggctgcaggagtctcctgtcctgtgtttccagcagctgtgtgtctgcagcctggctgagggttcgcacacagctcaggaaagcggctgctgagtctggcttcagggcagatccgtgtccctcttgcagcctgtgttgcagcgggctgattgcagacgtgggtctgggcctgtacttgacaggggaatgctctttgtacccctaagggtcttcttccgacatgtgtggctgtgggacacacagcctgccctcccatctctctttctgtgttgggcagctggagagccagtgcctggaatgggagcgggcctggctggcccagggggtggcatgtagctggatgccagagcatctcgggtccacccacctctccagcatggatcccgaggaggggctccaggccgaggagaggagaaggcacctctggctgcgcttgaccttgtcctgctcatgtctcggagcatctcagccagaaccaggaggcaaagccaggcagtgggagccgagtgggacctgcacacggggaggcccaggccaacaggtcagtgggctgaattgctttttcctgatgccgggttggcttgcatcagcgagaacttgaaagaggaagataccttttctcctgtcttcttgttttcttcagggggtgctatggtttgagtatttgtcccttccaaatctcttgttgaaatgtgatcccagctgttggaggtgggcctggtgagtgttcatgagtggtttggtgctgcccttgtggtaatgagtgagttcccactctgttagttcctgggagagctcatccttatagaaagagcctggcacctccctctcattgctcttgcttccattcttgccatgtgatctcaacacatgggctgccctttgccttctgccatgagtggaagcttcctgaggcctccccagaagcagatgccagtgccatacttcctgtacagcctgcagaaccatgcgccaaataaacctcttttctgtgtcacttactcagcctcaggtgttcctttatagcaacaccaatggattaagacaatgggatattaccaaggctctggacgatttgtgggtggggacagccgctggtgtttgactcctgcatcctgcaaatgtgatgaggagtgttgcgcagacaccttgggtgagcatcagaaccccatggaaagccctgtggtggtcctggggctcggccccacttgaggggttaacagcaccactgtctgttgttctggtccactgatggagccctccccatgccgggtgctgcaccgtaccagctgggttcatctgcatgaccaccctaggcaggaggcatgttactaaccctcctttcacagagttggggtgctgacataggacagtttggcactgccactaccttagtggccctggaggagccaggattgatggggggcagccttcagagcccaaccctccaccccatcctctgtatcaccttggaaccagccccccatggagacctggtataccccgttgcctggagagtccacatttctaatccttagccatcagctctgtgacactggaccattttgtggcctgtgtgacctttcctacctccataggagggagatgccaggtccatctcatgagggcctggaagacccagcagggtgatccgtgtccctgtgtatggaggcaccaggctctggaaacaccaaggcttgctggcttgctcttatttattaattatttattagttataattatttatttaattaattatacttatttattaatgtaaacacatcaggccctgctccgccaagcagaccccagtcctgccagagctgccctcctgctctcctcctcctcttctggtccctgtgaagtgacctgcctggctgctgatatttgggaaaggtgagttgctctcccaaccccaggctccagaggctcccggcggggagactgtcagatagcaactccatgttcccgacgcatgaccggacctccagagccagtggtactcatttccacatggccccggctgttgacgatgaccttaagctcccctgaccaatctcctccagaatctggcccccagatgtggagagggccggccgacctttgcggcagtcatttttccatcagaaggtggcttgatttgatgggttttatggttttgtttagatactttctcccctaatggtctttacatttcttatgtgtggcccaagatcttttggcaaaaggcaggctttaaaaattgaataaataaattatggagaatggcttatttaaagctctgttaggctgatgggggagagaggcggcagtgaacgtaagttaccggctatcgttatttattaatcaggtgttggtatgattggattacgccgtatcctatttaatgcttgggcagcgatgaactgatggggtttagaagtaagttgttctgaggataggccttctgcagcctgcagcttcttctcaggttatcttattcttttccatcttccctcagatacaaagaagggattatataacttgttttatctagttcttatattttaagataaaaatggaataccagtgctgggccgaaggctataaaattgtgatcaagagtccgtaaaattatagaacttatgttttcttgagaagagagaggattcacaatgactttttccttaaaggtgctggacacttaaggactgacccgcacagacgtgtaagatactcttccatgtggagcaaaaaaaatagagttatgtgcttgaaaggttaatggctggtaaacgtcaattttcttcaatcctggctaataaaaatagcttataagacataaaatgtcatgctgccaaaattacaggggcctttgaaatccattttgaagtctcgtatccttcgtaaatggtagtggggtgggggtagtgtgagcttcaagtgtttttttgtcatggttgagtgatggcacctttgcggggaggtcgaggcagctctggagtggtgaggatgtcttcctgtcttcctctggggtgtttttgggttaaacgtttaccatcctctggattcatagtctgggaaactttctgaggcacatctttattgcggtcgatctagccgccctgacacacttggaccctacggggcaatgttaaatactataagcacaatattctctaaaaatctcatttctaaatatgatggcagtgacaggcttttggtagaatccctgacattagaatgggtctgtcttcactttttgggttggaatttcagcacgtcaagattttggaactctccagggttttaaagggatggactggggggctgggagaataaggacttcttcctatcggcatctctacccccatggccccatctcatctgctttacttgggatgcaagtttgaggggacagcgcaaaggttctgcgacgagagcaaatgtggagagcctggcttccgaaataattgctgatcgtgagttaatttcccagtgccctttggggctggcatcctctgctgtattaaatccagcccattgacaatggcgctccttcttcctaagtgatagaagacagccctcagcatccagccctgctgagtcagcacagcagagaggacagcgggctgtctttgtcatttctttgtgagcagaggattaaattgccctgtgggctggcacggagccacaggccgtggctttgcatcctacaacgtgaggccccggcctgggggttctcaggtctgtgctcacatcccaaacatctcccacgctctcccccggcctcttcttacagcggtgcgtgaagccacgtgaactgaacatcagaatttgatttttccaccccaccaacctggaggttgtgccttaccctgggcaagtgagagaaggtgcccctcacgagatggttctgtcacaacgccatggtcctggttttgcctttttgcaatggaaagatgaaaacgaggtgtcgctgagctctcccctcaacgtgccaagattctgttttcggggataggctgggactccgggctgacccacatgggtttgcacgtgctatgtttaaacaaggcagctcgctgattgggggcagggtgggcagggagccgtgtgcatggaggacggccagagagagcgggggaccgggaggcaaggcgctgctcttgtacttggtggcttccttctttcacttaaaattgtgtcattaatggcttttcctccttttacaaaagaagccccaagaagagttttttcatgccaggcctcctcctcctcctcttggcagccccgaggctgcagcctgctggcactcaggattgtcagagacatgccccattgttggattctaaaaggaggattctggaaggatatcaatctccgacttgcacataaaaagtcccccagtggctttctaaggttgtggcttcaaggaggcactaattaatcacttcctccagccccagtggaatggaggggctacttctgagatagggaggctgcagtcgccccctgtctatctgctcctctctgccaggcagaaaattacattatttcctcattttgaaaggtgcttgttttgtcaggaagacatcccttccgtgcagttatctaggaattgtcttattgcatttctcccttatcagttttgaaataatattatttccttcttgcttaaatgccatatgggtcaaaacttttgttgctggaaaatggcaccatcaatgaatgcattgtttgttgcagaagttcctggtcaccctcagaggtgataaatgcccagtttaggggataccatgggcagtttgagggagtactatgcacagtttggggaagtaccctgggcagtttggaggattactgtgtgcagttgtttgggggagtactctgtgcagtttgggggagtaccatgcgtagtttgggggagtactgtgtgcagttttggggagtaccatgcacattttgggggagtactatgtgcagtttgggggagcaccatacgcagtttgggagagtaccatgcgcagtttgggagagtaccgtgtgcagtttgggggagtaccgtgtgcagtttgggggagtaccgtgtgcagtttgggggagtattgggggagtaccatgtgcagttttggggagtaccgtgtgcagtttgggggagtattgggggagtaccatgtgcagtttgggggaggaccacgtgcagtttgggggaggaccatgtgcagtttgggggagtattgggggagtaccacgtgcagtttgggggaggaccatgtgcagttttggggagtaccgtgtgcagtttgggggagtattgggggagtaccatgtgcagtttgggggagcaccatgcgcagtttgggagagtaccttgtgcagtttgggggagtacagtgtgcagtttaggggagtaccgtgtgcagtttgggggagtattggggaagtaccatgtgcagtttgggggaataccatgtgcagtttgggagagtaccttgtgcagtttgggggagtaccgtgtgcagtttaggggagtaccgtgtgcagtttgggggagtattgggggagtaccatgtgcagtttgggggaggaccatgtgcagtttgggggaggaccatgtgcagtttgggggagtattgggggagtaccacgtgcagtttgggggaggaccatgtgcagtttaggggagtaccgtgtgcagtttggaggagtaccgtgtgcagtttgggggaataccgagtgcagtttggggaagtaccatgggcagtttgggggattactgcgtgcagttttttgggggagtactgtgtgcagtttggggcagtactgtgtgcagtttgggggagtaccatgtgcagtttgggtaagtaccatgggcattttggggaagtaccatgggcagtttgggggagtactgtgcacagtttggaggagtaccatgtgcagtttgtggtagtaccatatgcagtttgggggagtactatgtgcagtttgggggagtaccatgtgcagtttggaggagtattgtgtgcagtttgggggagtaccaagcaccctttaggggagtaccatgtacagtttggaggagtattgtgtgcagtttgggggagtaccatgtgcagttttggggggtaccatgcacagtttgggagagcaccatgcacagtttgggggagtaccgtgtgcagtttgggggagtaccatgtgtagtttggggaagtactgggggagtactgtgtgcagttttggggagtactgtgtgcagtttgggggagtattggagtaccatgcgtagtttggggaagtaccatgtgcagtttgggggagtactgtgtgcaatttggggagtaccatgtgcagtttgggggagcaccatgcacagtttgggagagtaccatgtacagtttgggggagtaccatgtgcagtttgggggagtaccatatgcagtttgggggagtactatgtgcagtttgggggagtaccatgggcagtttgggggattactgcatgcagttgtttgggggagtaccgtgtgcagtttggggggagtactgtgtgcagtttgggggagtaccatgtgcagtttgggggagtactttgtgcagtttgggggaagaccatgtgcagtttaggggagtaccgtgtgcagtttgggggagtattggggaagtaccatgtgcagtttgggggaataccatgtgcaacttgggggagtaccgtgcacagcttgggggagtactgtgtgcagcttgggggagtaccgtgtgcagtttggaggagtacggtgtgcagtttgcaggagtaccgtgtgcggtttgggggaataccgagtgcagtttggggaagtaccatgggcagtttgggggagtactgtgtgctgttgtttgggggagtactgtgtgcagtttggggcagtactgtgtgcagtttgggggagtactgtgtgcagtttgggggagtaccatgtgcagtttggggaagtaccatgggcagtttgggggattactgcatgcggttgtttgggagagtactgtgtgcagtttggggcagtactgtgtgcagtttgggggagtactgtgcacagtttggaggagtaccatgtgcagtttggggtagtaccatatgcagtttgggggagtactatgtgcagtttggggaagcaccatgcgcagttagggagagcaccatgcacagtttgggggagtaccgtgtgcagtttgggggagtaccatgtgtagtttgggggagtactgggggagtactgtgtgcagttttggggagtactgtgtgcagtttgggggagtattggagtaccatgcatagtttggggaagtaccatgtgcagtttgggggagtactgtatgcaatttgggggagtaccgtgtgcagtttgggggaataccgtgtgcagtttgggggagcaccatgcgcagttggggggagcaccgtgcgcagtttgggggagcaccgtgcgcagtttgggagagtaccgtgcgcagtttggggggagtaccgtgaagcagtttgggggagtactgtgtgcagtttggggagtaccatgcacagtttgggggagtattgggggagtaccgtgtgcagtttgggggagtaccgtgcacagtttgggggagtatcatgtgcagtttggagtactgtgtgcagtttgggggagtaccatgcacagtttgggggagtaccctgcgcagtttgggggagtaccctgcgcagtttgggggagtaccatgcgcagtttgggagagtaccatgcgcagtttgggggagtaccatgcgcagtttgggagagtaccatgcgcagtttggggggagtaccgtgtgcagtttgggggagtaccgtgcgcagtttgggggcgtatcatgtgcagtttggagtactgtgtgcagttcgggacacctgactgtgcttttctgaaggatcctggattctgagtatcactgggggtggaagcaaacacttatctactgatttgctaacatattgcactgttaatctcaacttgccttctcccagtggaactgctcttggtgagactgtagcttctctctaggaagtgatttgatttttgatgtaaggaaaaggattagtgtggctggattttgataaggctggccgcctggcacatcagcgacactctcatcccatcagtatcactgacagcgggttcgttatgcaggagcactgcagagcggtgatacgggacgtgcagagataattgtagttttgctatttaaaaaataagtctagtgctttacaatgtttaagtgataacctgtttagaaaaactcacagtgcctgtcttttggcacagaaaaacctcttctagcagcttgacttggattttattaatctatttttattttcctgagtataaattgaagtctcatttctgtttgaactcttaagctagaacttaagaccggaagtgcacatttgcactttcaaactcaacatatttccaggggttttatagcaatgttgggcttatgcctttgcttttcagtgatctccagctttgagattagatgcacttggttagactcaatgtaagtagcttgctctatggtgggtgttttttgatcaaggtgctaatcttggtgtttacctggggttgtgagaagagaggattaggaggccgcacttgagcagtggctaaatcccatgctatgtcgctgctgtctttctgtccccaccaggagaatgacagggccgtgcctggcatccctatgccattcttgggatgatgttctgtgactctctcactggctttgctgcttctcttgtggccaagtcagctgttttgatgggatggacatccatggaggccaagaatggtggtcctgggcagtggagattccatcactgtggctctaagaactccacggggtcaggggctgttgggcagagggaggcacaggagccagcaagatgctgcacttttcatgaatggatcacattgttcattgctgttattggggttttacttcctagacacctgtgggttcctggatatcaaagtagttgtagtcatctttgtcccattcagcaggggatcctagagactctcaggttctctaaaagctttgaaggctctgctctatgcagattaaagtccaagtgcaccattccaggccctccatgcagtggtccccaggcctctgtccctttttccctgtcacacgcccacccccttctaggcaccagcactggtctgcctgctgagcttgctagaacttgctagcccttccctcatgtgttcctttgttttggctgccacctctgactggcttgccatttcccctgtgggaatcttccagggcttctgaatttaagagttactcctccactgagccctcttttgcgtcctctcccttcccctctacctgagctaagtaagatgaattatttccacctcttttgtctcagttttattaaagtgtataatgatataatgtttttgtactctcttctgcgtcttcctaaattgtggccttgttgtgactttgtgtgtgcgtgtgtatgcatgtgttagatagcagcgagagaagtgtgaggggtgtgtatgatggaaatggggagagagaaaactacctcagtgcactcacatgaagccttcttcccaggagggaatcttcataatgaaaaggagaggagccttctcccacctcgtggagggggtggcagtggtggaaggctggaactgacaagcaaggaaatatgaaaggattataattggaaaaagatgggcataaaatgaaaaagccaaagtatgttttattttgcacctgtgtattcgggcttgctcggtttatttattaagccgttatcaaagtaaagtaagacaagtgagtcttagtctaatgaaattgcccctctgtgggccatgttggcatcaggtatccagagcataattggataacaatgacaattactgtgtcgggagtttcagcactggacggcctccgctttcctgtgctttctgtgcggtgtagctcatgagcgttctgatggagcaggggagggccggcttttccagctctggttccgacttggaactgcagggtgggtgccgatcgggcctaatgggccctcacatctcagcccctggcgttgatctcagattcagagcctgcgttatggcccaggtgaaaagcacgtctgttgccatttgataaactttcactcagtggcagtttgcctgctccgggcatctgtgagccaggcaattgtctgtcttggggtcagggggccaaggagccccacctgtgactcctgcttcattttttaaagtatggactcattgcttctcctgccagccatccttccctgagtaactccattgcctgtatcatttcactgctgagaattgggcacctctgtaaaaattatattgacctgcaggaactaagatctgcaagtgcctgtgtgcttaaatgtgcaggaatcaaactgcttggctgataaccttttattgattcatctcctttcactgctttgatgagcctgaggcctcctcagataaggaatggatgtgctggtgttgtggccaggcatggaagttctgactctagatgttaaaatgatgtgtttgcagactgaggacatgcacctttatcacggtccgtggcgacctcaggctgtggcccatctggctgcatggtgcagctgccccttctgctctgagaggcagaggccctcttacgcctggtgctcagcccttgggaagtggctcagcttccctttagagtctccctgaagtgtctacaataattgttctgagaatgttcaaaatgcaagggaaatagaggccatttggcagggactttgggagagaaggggagtggtccatgcaggatcttttctcccctcgagaacaaggagctgagactttgctggctccccctccccagtctgtgggagcccagtggatagaggaagagcagcctcacagcagtcaggcctgcctgggctggccgtgccacttacctgggaggagttgatttgagggacttctcttcataggtggcaatggcaagtattcttactggggagattcatgattgacttctggaggctttgccatagcagggttcattatgagcagctgaaagtggatgcatctgccaggggagctgggaccagcgtgctgagagtggaggggctttgtggctcccttctctcttattctaagatcctccccacaggcctctattttgagggatgagaagccaagtaggcatgactgacgttcctgagagctgccccattaaagtctccgtcacagccttttattaagcatgttattaaatgagcatctgggaacattctacgtggtgggcagagccaggctccagagggacacggcgaggcactcatgctgtctacctggccataaccctgccccagtggggcttcctggactccctcccacccacttggctagaactcattggccctccttccctttctttggttagcacctaccgagcctcctcccaggcagcaaggaaacctcggccttttcccagaggggcctggcagcccctgcgtctctggacctctgctttagggaactggccctggggtttgtgttaccctctttctccagcaagaggctcagctcctaggggtgggggcggggccttccatttcccacagtcacccatgggcgctggcttcctgagtgggggaaggctcctgcatcctctgtctagagcaggtcaccctcagtgtccccagggatgggcctcgacagcagggagcagtgaagccaggactgggggtctccacgaaagcgcagaggacattgtttcccgggaacgtagacatggcccatccttccaatttccgagaaatggggcagtctggacctcgatgtgcaagttccttattttgtgacgttctgtgcaccaagcacagcacatctgcaggctgagctgtgggcggccaggtgctgcctgccggctggggctgttgtgagtaacggggtgattgcacagatgccaggatttctgtgagcctgccctgcttgaagatacggatactcggagggaaaggggacatcttcaccagggcctgttggttgcaaggagatggccttctcaaggcagtggagacccggcccagtgttagctgactccatcggtggggttgcctgcagctgtgtgggtggggcaggcgggaatggctgtgaagtgcggggcctcccaggtgggactgggaactcacccaccctgggctgtgagtctgcgtctgccagccttgattgggtctgccaggctgggtggggtgaccctgggctgtgtgtgggatgggctctctgagcaggatgggagggtgagaattcagggccagggtacacatagggtgatggtgcggggagttgcatgggaatgatggcatattttcacctgagatgcccaggaaggtggaaagagaggatgtgaactgccttttgttcaaacataggctgttagagccagaagccacccaagcagccaatccctctctggcgcctcccaaggcgggggcgtgtgacgcgtgtgaggacgccaggtgtaggccgcggcacacacagcccctgccttggaagacggtgccctggtaagttctcttccaacatggcggtgggggccgatgtccccactctcacgaatcttcctttttcctgtggaaggcaggctccaactagaaagccagggtttcacggctgtgaaaaatactgtgtttatttataagcacaaggctggggtagtgatataaagttccctttcagatacacggacttatgggaaataatggagccaattaaaataaaagcagaggccctgacatctagtgatggggatgtgggggcagcacagttccagcacccctgggctaacgtggcttatgcagcatccctgcgtgtgaagcgccggccacagcggcctccctggtggggggtttcgatgctcttgagtccctaacagctctcacctcgctaccctccctgttcccccgagtgaaggagagtaggtgtcggggtccaggaacagctcaccctgccgcccgctgcctgctgcgttcctctttagggtggctttgctttctctttttgtctccactgctggctttccattttccagggtgactaaatgtttcccatttaagttatgagttattaaaggaaactaggagggacataatggtagaaatggcctgcagatggggcctaacgcctggctggggtcagagctggcactggaattcgggacagcccagacggagaggaccgtgcttggctctgtcatgggcttatggcctgggaggctccagcgggttctcaccaagggccgtggtctcaatgttggagttctccccagattcctgtgttgaaatcctcactgccaagctgatggtgttagcaggtggggctgtggggaggtgagtaggtcacgaaggtgcacccctcatgagtgggatgaatgcccttacaaaagggaccccagagaggcctgcttctccttcccccatgtgtggagacacagcaggaaggcaccatccgtgaaccaggaattgggccctcaccagacacggaacctgccggcgccttgaccttggactgctagcctccagagccatgagcaaccagtgtctgttgtttgtgggccgcccaagggaaggagctttgtgacagcagccagaaagactgacaccaagtgctcctggtggtctgaggtccgtcccagccccgcctcccggcagccatacatggcccaagggagaagtcaggcagtcacgtgcacttgctgctgcctccaggatggcaggataaatcctcagtgttggggggcaaggctgaccacaaagcaaacaccaaaccaaagaggggcattcccgccacctcctcccctggaggggacgcaccccatccctgtgctttcatcatgaggggttatgaccatgtcttgtctgccatctgacatgattgcagacatgttagacacgaaagaaaacacactggctctgcagagttagcaagtcctggccatgattctgaatctatttgaatgttagcttgaaaattccaaaccgatgtgaagggagtggccagagaacagcagcacactgggggttgggccagtcagcagccatggtcacgttggaagaaggaagaatgcacctcggaagcacgcatggcatattgtggtttctcctaaaaagaaattcacggctgggcatggtggctcacgcctgtaatcccagcactttgggaggctgaggtgggtggatcatttgaggtcaggagttcgagaccagcctggccaacatggtgaaaccccatctctactaaaaatgtaaaaattatccaggcgtgatggtgtgcatctgtaatcccacctacttgggaggctgaggcaggagaatcatttgaacctggaagacggaggtttcagtgagccaagattgcgccactgcactccagcctgggagacagcgtcagactcagtctcaaaaaagaaaaaagaaattcacctttggctctatccctcttactttcataaaacattctgtattttcaaaatgccaaaaaaattattgttaaagactttagaaaacagaaaagtacaaagaataaaagggtaacttcatttccctcctctgaacaaaccacttttaatctttggcatggtgtgtgtgcatgtgtgtgtgtgtgtgtgtgtgtgtatgtctatctgtacttgtacctgcacacacaactggatgagcatggtgtgtgtgtacacatgtaatgtgttcatatgtacatatgtgggtgccttgtgcacacgtgtgtggctgtgggatgttcagatgtgcatgtgagttggtgtgtgtgcatgcccacaagcatgcatgtaaatgtgatgtgctgtgtatgcacacggataagcatgtgtgaaggagtgcatgagagtggtgcatggctgtggtgtgcacgtgtgtgcgtgtgatgcatgtgcatttgcacgcatgtgctgtggtgtgtgtgatgtacgtgcatttgcacgcgtgtgctgtggcgtgtgtgatgtacgtgcatttgcacgcgtgtgctgtggcgtgtgatgtacgtgcgtttgcacgcgcgtgctgtggcgtgtgatgtacgtgcgtttgcacgcgcgtgctgtggcgtgtgtgatgtacgtgcgtttgcacgcgcgtgctgtggcgtgtgtgatgtacgtgcgtttgcacgcgcgtgctgtggcgtgtgtgatgtacgtgcgtttgcacgcgcgtgctgtggcgtgtgtgatgtacgtgcgtttgcacgcgcgtgctgtggcgtgtgtgatgtacgtgcgtttgcacgcgcgtgctgtggcgtgtgtgatgtacgtgcgtttgcacgcgcgtgctgtggcgtgtgtgatgtacgtgcgtttgcacgcgcgtgctgtggcgtgtgtgatgtacgtgcgtttgcacgcgcgtgctgtggcgtgtgtgcgtttgcacgcgcgtgctgtggcgtgtgtgatgtgtgtgcgtttgcacgcgtgtgctgtggcgtgtgtgatgtgtgtgcgtttgcacgcgtgtgctgtggtgtgtgtgatgtgtgtgcgtttgcacgcgtgtgctgtggtgtgtgatgtaggtgcatttgcacgcgtgtgctgtggtgtgtgatgtaggtgcatttacacgcgtgtgctgtggtgtgtgatgtaggtgcatttgcacgtgtgtgctgtggtgtgtgtgatgtgtgtgcatttgcacgtgtgtgctgtggtgtgtgtgtggtgagtggatgggaggatatttccagtgctctcctcctgggactgatgccatgatgaaaatctgtgtaaaccagacagcacatctctcatcatttctttgtgatgggtcattagaagcaggattctgaatttctggttcagaagctctgttacgtggccctggatccacacatctaaacgatgtttcagaaaggtggtgccaatttatattcccagcaaggacactggctgtaccatgtccccactgccaccctggccctagttctgtcatgtgggcattcctttggacgtgcttcccaagtggacaggtgtgaggtggccccaatcaatcccacatttactcaattagtggagaggctgagcacttaaaaatctgcttagctttggccgggcgcggtggctcacacctgtaatcccagcactttggaggacaaggcgggtggatcacaaggtcaggagatcgagaccatcctggctaacacggtgaaaacccatctctactaaaaatacaaaaaaaaaaaaaaaactggcctggcatagtggtgggtgcctgtagtcccagctacttgggaggctgaggcaggagaatgcttgaacccgggaggcatagcttgcagtgagctgagattgcaccactgcactccagcctgggcaatagagcaagactccgtctcaaaaaaaaaatctgcttagctttcctcctttctttttttgtgcatcacgtttgtgtttgcgttttctactgagggtggtgggaatggccttgtgcaaacacagagattcactggggcatcggacatctctcttccacctacaaacacagcttctgggtctgtccagccacatcacagaggtcacatcagtctccggggctgtttgtgacttgtttcgtatagtcctggtgccttcttagagtttgtccctaagtgtttaacatatgcccaacacatacttataacatatgcctagcatgtgcttaacatgtgcgccggacagaggtgctggtgatgtgggtggttcagggaatctgttttatccaaggatcattagttatattgataaataggcaaaacccatccaaactggctgaagcccccaatgcaatgtttttgaaagggaatggggctttctagggcctggaaccaaacaataaaactttttgtcaaaggccagatagtcattattttaggcttggcgggccagatgtcgggacccactcacctctgtgacgtaggtgaaaagcagccttaggagatatgtacatgaatgggtggggctgtgtgccaataaaactttatttacaacaggctgcagccagattgggccttgagctgtggtttgtccctccctgctctgtaaggacacagccccttgctgctgcttctctactttatgcccccatttttgctctctgctcagcccagcctttcctgttttttttttttgtttgtttgtttgtttgtttgttttcagcacttagaggaaaacggcccctggccgacagccaaggctctaacagcctctttggccctcctagtggcattataaagtttggcgttattggcaccatttgacaggtgggaaaacagaccagaaagcccgtgtgacatcgtcaaggttacgaagccacgaagcagcagagctgggcatcgaacccacagctgcctgctcttgacactggccataggagtgtagcatagagcaggggcaggcatcgaacccacagctgcctgctcttgacactggccataggagtgtagcatagagcaggggcaggacgggtccgaggccgtggcgcatgcctgtgagccacagcacccaggtatggagaagaaggaaagaggggaagcaaaactcagaaaacagctgaaaggcctggcctgtgcggcccctccgagcctgccacggagcattttttgccgggcagataatgatggcaccataatgatgactataataatgaaagataaaggaaatgaaacattattaaccattgatggatagtgtattcagttttcaatttaatgatctgcaactgcaaatctatagtcaagaatgaaccaatttctcacttcctttttgctctgttcatcccagataaggaaatgaaaggattactctgcagacatggaacccaaatgtcaatgttctgcctcattagaagacctggcgcagacgcccctgaaagcccacgtggttctggtgatgttgcccggctcacctggccagggggctggggatggccgtgggcacccacaccaacctctggcctcagcaggcaggaaaggcggctcagaggcatcccagatccggacacctgatccctctctgtgagtgccctggtgctggcttcttttccttcccccttcctatgaatgtgccccagattccatgtgttaagtattgcgctctggatgtgccagcccatcctaatgaggagcaagggatcagagggagatggtgctcagattgatggtgagttggccaaggtgagcattcatatctccttctcaatgcccttttgcactgaacactgagaggggatgcaacccagactcccagatctggccccgctttcttcccggcttgattagctggacaggaggcagtgcagggtgagagccttctgttcaaagccagacctaagtccagaggagtgcgtgtgctgggactggggttaatgctgacgagctgcctccctgtgtcatatggacttgaggacccacttgctttgcgaagctcacttgtccagctgtttcacacatgtgaccccatggaacctgccagacccagccaccgcagcttctgcggagggcatggatcaggcatgttctttccatgctacttagtgtggagggggcgtgtacgggtttcagttcagaagtcaagagtaacagctaatgcttttacttcaggagtgaaattacaagcaaacctcctgctcggcagctttgtgcaagtaaacatatgacagcgtaaaagctttttaacatccctgagtattgctctggttcacaagacgttgaaaactgaaaataaaacaatgagaagagttgtgtttgtcagcccagcttgcagggaagaatcccgaatagctgacgagttcatttttacttatttatgggcaaatttcaaagttgcatctgttcctattctgtgagcactcagacatcctctgggactttgtttgtttgtttgtttgttggtctctgtgtgactggcatttgcctgaagtttaatatcaagtaggccagatggaagaatgggcaagttaactccagagaagccgattgtcttaaacatactggatgtcacccttctcaatggtgcttcctggagcatttaatttgtgggacaggtgtctcagtgggacacgaatcccccagctgtgcagaacagtcaatggccacggactccaggtcccctccgtgccctgctccttggccctgaagctgcaggtcctctgtgagcctcagtgtcttcgtctgaaaaccaggatgagactcacagcagccttgtcatgtggtgaagtgaggggagcttgtgtgttggtgactttgtggggtgcctggcgggcagtctactctcagtgcacactacatcttctttaaaataagcacgaataggggcactcatggccagcttgggcaacatcgagagacctggtctctacactaatataaaacatagctgggtgtggtggtgcacacctgtaatcccagcttctcaggaggctgaggtggcaggatcacttcagcccaggaggtcaaggctgcagtgagctgtgattatgccactgcaccccagtctgggtgacagaacgagaccctgtctcaagaagaagaaaaaagagtgcttatggggtcctgtgagtggctgagccctattcattttctacagtggggtagcattcacaagggatgccccattgacttctgttccctccctgggcacaggggtggggtgggagcctggagtttggtggaccgtcacgggcatgcatcccaggctgccgaagaccctgcttaccccatgtggccctgggcctcttgctggggtggtgcactcagcatggaggcggggagagagagtctgtgtctgcatccctgcctgccagccactccccctaagtgaggcttgtgcgtgagtcccgcacaggaagcatccattgtgggaataagaggcgtgcagggaccagcctcctggggttgctgtggaagaggagcctgaagccgggaggacaaggccagtgtccgggtggcactgtggcattaagctgcttctgttaggaaatgggtggttccttgcaccccagagtgtggtggaaatcagcacgagggctatgttatctcagtgaaatatgagttccacagcacgaaaggaaacgacagccaacaggatttggtagaacagttatcagccttggaaaattatatttatccaaatctgcttggtgaaagaaggctctggtctgtttttattctcacgattttgtttttaccaagtagaacgcattcctcaggagaggtctttgggcacaggatccagttacattttcccagaaaaaaaaatcccttttcatgggattggctgtattttctgagtgatccacgaaaatgaggatttctcaatcttctggataggcccccaaagttgaactatgtaacctgttagagctgaaaacatcatgttgttcgctcttggcagacaacctaatgcccttgacagccagcgttcaaagcggtggccattggttgctgggtgaccctttgtccgcacttaggccagtcttatggatggctgggtctggagaaagcaggtggtcagaggctttgctcattcagggcatggcccactcagtgctgccaagagcccctgagcatgggctgggggctctgagcagttcctgatgaatgagctctgtgcagccaggccctgatgcccatggtggtctcagcaggcaggccagagctgcggttaccacggggccaggcagccctcctgctgcaaggagagggagcattaccgtcagaagcacaactttgctgggctgccgcggccggctccagacctcacagcacatgaaggtgccagcgattcgagcacgcctgcccggcgctgacgttgccggctgctccacaaagcagggcggccaaacaataaaaatataagcaggtttggcttttatctgtgttgggaggttcaagggtattccttgtcttcaggcaacaataaaatcatcatgttctgaggcggaagtcataggctttcgctcttctaaagtaaactggggcttaaaaggaaagtggcttatagagatcctattagggaaggaaaaaaaatgtttttaagctaggaattccttctctttctcaagcagttggaatgacagagcagtttatgaagcacactcttctttagaaggcagaagttgtttcttccctaaggccaaacgtaccatttgcagacactctgagcaagattctggggtgatggggagggcagaggagaacggggtgccccactgcaccctgccattgcttggtgggccttgtcctggcctgaacagtggcatgtgctgagcggcgtgctcccagctcctggcactgtcagctgtcagcacgctccctcagtctatgggtagggacaccaaagctcacaggatggagtgaccagcccagagtcccacatctgagccaggatctgacccagggtcatttggcccccaggctaagtcttctagccctgaagccctctcttctctgggggaggctgtttctgaaactctctgcctgctcgtgccaccagcgcatgccaacagtaaggggtacggggtgtcgccagcctgcagtgctgtgggagagaaacaatctctgttctggtgctgtgtgggtgcccaggggcatgagtgcctggggagtgtgaccacaggccagtggcagtccctgcctttggattaaagagccctttgaggcttgcttggtgatgtcatggaaaacagcatatgacaccaagatatccccatatccaacgagacttgctgggtttatccccgtatccaacgagacttgctgggtttatccccgtatccaacgagacttgctgggtttatccccgtatccaacgagacttgctgggtttatccccgtatccaacgagacttgctgggtttatccccgtatccaacgagacttgctgggtttatccccgtatccaacgagacttgctgggtttatccccgtatccaacgagacttgctgggtttatccccgtatccaacgagacttgctgggtttatccccgtatccaacgagacttgctgggtttatccccgtatccaacgagacttgctgggtttatccccgtatccaacgagacttgctgggtttatccccgtatccaatgagacttgctgggtttatccccgtatccaatgagacttgctgggtttatccccgtatccaatgagacttgctgggtttatccccgtatccaatgagacttgctgggtttatccccgtatccaatgagacttgctgggtttatccccgtatccaatgagacttgctgggtttatccccgtatccaatgagacttgctgggtttatcccgatatccaatgagacttgctggatttatccccgtatccaatgagacttgctgggtttatccccgtatccaatgagacttgctgggtttatcccgatatccaatgagacttgctggatttatccccgtatccaatgagacttgctgggtttatccccgtatccaatgagacttgctgggtttatcccgatatccaatgagacttgctggatttatccccgtatccaatgagacttgctggatttatccccatatccaatgagacttgctgggtttagcaccacagatgccagtcacagaggaaattgatggcatggcagacagcgtgacatgttgactacctgccctggtccttgcagatggcatgggcacaaaggggatgtggggtgaagagttgaaacgagtgccttctccagaagatggcacaggtgtaagatgaagacagccccaatttctgtgtcactggagagaagaggacccagccacccacagtgggctgtgatgtgggggagaaaggacctgctactcttcctagcctctgaggtttaggaatggaactgttacagaaaggagccttaataacccaaaccaataaaagtgggccatattcctgaaaaatctaagggtctgatgttagcttcaggcatggctggatccaggagtccaaacaccgttatcaagagcctgtatctttccatctcttggcttggcctttttttggctcattctggggtttggtttgttcgtttttcttgactttattctctagctagatcttccctcgtggggcatctgtgtgtcccccaacccctgtctcacactcagctctgtctttttggctttcctgcctgcaccttggcagtccctgcgagtgagaacctctcttttccagtcatcctcccccaagtcctgtctctgagtctcactggcctgactcacaccttgtagtgagttgaatggtggcctccaaaagatatgtgcacccagaagctgtgagtgtctttatttggacaaaagggtctttgcagttgtgattaagttaatgatctggagacaggatcaccccggcgggtcccatatccggtgacaaggcacagccatgtgaagacttgtggaaagaacgagaactcaagacagtaccgtggtgtgtgggccctgggcctgctcttgtggcaggaggtcacatcttacaggtacccgttagctgtgtgaccccggacaagcttctcaccctctctggacttcagtctcctccagagtaaggggggataatggagtgcctccttcatgtagggtgaaatagctaagaatgcaaggtgctgcaaagactgccggtcggcaggagctccctgagagcctttgttcctccctaaggcagtgtgccacaaggccaaacatgcgggcacccgcgccaggccaccaggttaccgggggtttccagtctgaccctatcccagtgacttatggcctcggagactcggtttccattatcttttttttccacttttcctttaggttcgggggtacatgtgaaggtttgtcacacaggttaacacgtgtcacaagggcttattatacatatcatttcatctcccaggacctaagcccgatacccaatagttgtctttcctgctcctctccctcctcccaccctccctgctcaagtagccccccgtgtctggtgtttctttctttgtgttcatcagttcttatcatttagctccctcttataagtgagaacatgcggtattcggttttctgttcctgcgtaagtttgctaaggatgacggcctccagcttcatccatgtccctgcaagcagtatggtgattcctcaaatagctcaaagcagaactaccacttgatccagcaatcccactactggatatatacccagaggaatgtaaatcattctaccctaaagacacatgcacgcaaatattcatggcagcactgttcacaagagcaaagacatggaatcagccgaaatgcccatcagtgacagattggagaagaatatgtggtagatatacaccatggaatattaggcagccagtttccttttctgtaagtaaggactgagatagtccctgcctcgtggagttgataaggatgtgaaacgcatccaccccagtcctttttgagtgggcactgctctttttattagtatgatttttcttccattgccatcctctggtctagtctagtggttctcaaagggggcaagtccagccccaggggcactgggcaactactggagacgtttttggttgtcacagcttggggaggggtgctgttggcgtccagtggatggaggctggagctgccgcagaaggtgctggtgggcacaagacggccccaccacagaggacggcccagccccagctgccaacagcactgagccttggaagtgcggccagggctgacctgcagacgcacagcgcactcacgcccttatgcggagatttcttcctaacaggtctgctttgaggtgccagaaacacgagaaaatagagaaacttgggcaatgctgtttttgtttttgtttttgtttttgtagcaacctctgttcaatgaaggagttgagtcccaggaaactggcccctgagcagcctctggtatcagcagtccagatgcagaggtgcctctgtgccctaggagggaggaagccccacaaggcaggcagtgcctgcctgtttcagatgctgtcagcaggcctttgagtctgtgtgctgccggggtctgcggcgacctgcctaggggcctggctgtggctgggtgtggtccccacgctccccgaggctcagggctcccctgagtgtagccacttccgcagatcccctgcagctcccatcaggatggtggggacctaggagggagggctggttccttcagagagacagggagacttttgctccttctagctgtccccacatgaacgtagtaggacttggcctgcgggttctagctctccccacatgcacgtagtgggacttggcctgtgtggatgcagagaggaggatgagggtggatgagagtggtctcacagctcctgggacgggtggcaggaggacccgtaggacagggaggtgcagagtgagggttagtgcacagttaccccggtatctggtcccatgggttcacagagtcacgtgactacagctccgacccctggctggagaggccccaggtgcccggcaggcgtgcggggacttctggggaaggaaggtcagtcactcaaccaacacttgttgagcgccaggcctggactggtcctggggacaacagtgccaagaaagtcaagtcccagccctgaaatagccttgcatgtgtccccatcagcgggacagagagacacatttttaaagcctagagaccctgggtgtgacttgtgttagaatcctctttctccaagcctcggttttctcctctgccaaatgagcacagcacctcttggagggaggtgaggacctcctaaattatgagcccttcagcctggaggtgctcttgctgaggccaagaaagagccattgttattgaagtgaggggagaggaaggtgcccagagtgcctgcttcttcctggcccctcaccagggtggcatcctggggtgggaggtggttttttgagaactgttcggcagtgccgggttttgcgggtccactttgtggtctggacatgcccgtaggcacagggaagctggtgaggtgctggggggtcagcatgggggtctttgtggtcgtttccttctgtttcacagtgtggagaccccgggacaggtgaaggccccggcaggacaggtggtcagtgtgggtggagcgtccgcaaggatgctggcctggctctgaccttcacagagaacccacgtcctcatgggtggtggtggcttcagtcagactggccgggccagccacccccgcactccctgatcctgccggcatcatgggctgacctggaggctggggggtctgcccgtgacaccagccctggttccctgagctggggtctgcaccggggccagggctgctgacctgctagagcccaaggccaaaggtctttgaggtgggtctggggcaacgggggtgaagtctcatgacctgccatcaccctgccctaagctctgtggtctcgccatctgggagggcagcagtcaaagtgcactgagatccccccggggcagggccccgactcggcccatcctactcacagctcccagaggaaacacagctgctcttcccatcaccctccaccctatgcccctttaatggacggctgagtggcccggaaaggctgcagaactggcccacggtcaccatcttcaggggacaacatggttcattccactgtgggaccccacacatgctggacactgctctttccccaggccttacacctggcctgtgtcgctacacgcagggcccctgtcgcccactccagcagcctggagcctgtgagatgtgggcattgatgtcctctgggccgccctggggaaagctgagcccctgacaacagagctgaaagctgggacccttgtgtgtgaggcctgaggacaggcaccaggctggaccaaagctcccgatctggtcacggcgctcggtgtgagttcacagggcagtgattctaaacctggctggtgcatcgggcacagggtcacccactgatcccaaaccccacccgagctccaccaggcccaggcctctgccccaaaaacacggctgtggagctgttgaggaaaaagaaagtgagcccgcgagaatgtccccttggatggagtctctgtctggccttgcaccctcaatatcctggtggaaaacagcctttggggatgactttgtcgaaggcagggagtgtcatgggagaatgtggcgtaattataaacacatttgcatgtattgattatttgatgaatcaggctgttgtacgggaggggaagaatactttgtttttaaaaatgcacttaaagcactgtccctgtttcctggaaaattttttaattttgctgaggttgggacatgtttactgatgttttacatgtgatttttatggataccttgagttagaacactgaccatgcggtattgagggagtctggagtccagcacccgaaagcacactggcgaagggtgtgacctcaggctcacaccccgctctgttgtctgccaggggattgcgacatttgtccctgtcacctggcatggctgtgatgctgagatgcagttgtggatgtacacacactgcgactgttgcggagtggaagtaatcagtagcaatggccgcaaactccctttggtatctctgatttcaatacttatcagtatcgaataactccaggaagttgcagacttgcgagtggccctgggcgtcatcctgcggttcatatttctcggtgaggaaacagaggttgtagaatgtggccagaagcctggtcagcagagtggcctgggcagaggctgagctggataaatggcagctggggaaaagcggggaaggaggcggtggccaggcagacccctgtcccttaccagctcctcgtgcccaccagctgctgcccggcctgtgtccactcactcactccccagggcggccagcagggtgtgtcctggggtccccggccggccggaagcagctgcctccctctctggaaggtgctttgaagggagctgacaccagtggacagctgtagagtgagaaagtgccatgggtatcgcggaggccgtgggaacacgtgggagggtctacccccgctgcaggaggtggttttcaggaggacggagaaggggtggggagtagttaatggccgagccaggacggtggggcaagggggagtggcctgcgagaaggagagcggcttctaggcagcaaggtagaccagatgatccacaccacatcaagggttggatgtgctggaactttagagttgtcgaaataagtatgagtgtgtgcgtgtgtgtgtgtgagagagagaccttagagttgtcaaaataatgagtgtgtgtatgtgtgtgtgcatgtgtgcgtgtgtgtgtgtgcgtgggtgcgtgtgtgtgtgtgcgtgggtgcgtgtgtgtgcatgcgtgcgtgtgtgtgtgtgtgtgagagagagatcgatctactacctgcctgactcttttctcagcactgcaggccacgggccatgcttgcacagaatacacacttcaggcagggctgggcctgcctgaccctggatctcaaagttttttgaccatgattcatagaaaaaaaatgctttaaaattatgggccaggaaataccccccaaaccctccctccccacagaaacgtccccacacacaaacagaaatcagtgttttgcagagcagcatttaccgcctcgtaaatgttatcgatacaattagaataggtactttttttccattctgttcgatttcattttaaaatgttcaccatgccacacgaaactggtgtcccaggtttgagaagcgtgttctggaaggccagacccaggcgtctggggtgatattctggaaagagcaggcatggccgaaggtccctgaactgggcgtttcaggccacggcagctggaagggtgacggacggacgatgggcaggtggcgtcaggtggaaggagggacgggggtggagaatgggtggatgggtaggtgggggacgatggatgcctttaagtctcttcatagtggttactgtcagctgacttcctggagctgctggctctgagcgacagaactgggagctgaattaagtgagagggaccccaggactccaggacttccacctgagcttcagaggagcagttctgtctttacttaccatgtattaggggttcctaacaaggatccctctcttaaaaagtgtggaggcaaggagtggtggctcatgcctgtaatcccagcactttgggaggccaaggcaggtggatcagctgaggtcaggagttcgagaccagcctggccaacgtggcaaaaccccgtctctactaaaaatacaaaaattggccacgcacggtggcatgtgcctgtaatcccagctactcgggaggctgaggcaggagaatcgcttgaacccgggaggcggaagatgcaatgaggagccgagatcgcgccattgtactccagcctggacgacaagagcgaaactccatctcaaaaaacagaaaaaaaaagtgtggaaaagtcctggccttagggtgtgaagaacaccctatatttggtataaagtaataccctggatgaaggttttgctcaccatgaacatatctcagaggcgaatccccatggtccatctgtgtcttggggcccctgggcgtggcccactgacagcccaactcctgagggctgggcagcagctgtttttccaaagccggggcggtgcctggcacacagtgggcccttcagaaagatttgtcgattgcaccaagaagctcctctgtcctgccacctagagcaggctggattctggaggccttgcagcgcactttcctgccctctcgcgtgtatgatagagacattagcgcgtgtcagcccctttaccggggcttcccattgtcttagcgtgctcctttcatctaatgagcaggcgcccttggctgaacttttcaggaatccgtggggaaccagagtgaatatattatggcgctgtggagcgaatgacaatcgggcagtgctcgcctgtggccgtggaggtatctgcgccaccgcaaaatgcctcacccttcttttgggttttggggtttcaggtcagctctgggggcccgttatcccgtgtcaaggaggcccacgcaggcacccgaggaaggctttggctatcacgaggtggcctttgtgcaggcgggttcagcaactttggcattcattggggcagcctgttactggtgcttggagtaagtgaagagtgcgattgggcgccagagctgacctggcagggagccgggtttccggcctgtgtcagcggctgcctaaccgtggacaccagcacgatgactcagtcctgaccgctataagcatcccggccaccagctctgcatcatcagggagatcaattaaattgagtgtgtgtaattctcggggattagacggaagtgcacaggcttcattgatccactctcctagacaatcagcaggcccctccaagggctgaggacccaccactcagcaggaagcctggctcacttctcccccacaccccttcctcccgcacttccccacgttcctctctcctggattggatttctggaaggttctgctgggccacgtcccgtcaggtcctcaggaacacggcatgcacaaccacacaccccgtctgcaggggctgcaggtaccctgaggccctgggactctgtgtttttctgtggttaccacttttcctttgaacaataacattttttttctgagacacactctgagacttctggcacccaccgtaccttctaattctactataatcatcacccttttctcttgccaaaaaaaaaaaagaaaaagaaaaataaacttaaaagaacacagactgaagaaagtcatttccaagttaagctgcgaaggggtctgaaatgtatcgctggtgagagtctttttttttttcatggtaaccacaaaagcaagtgcactagtgtgtctgtgtatgcggtaaacaaaatggtttgccaaactcaggaactaaaaatgctctaaaagaacagagttcatttctgaaaacagccaatttggaaccctggcaccagtattttgagtcagaagatcactgagcattatgggttgaattgaatctcccaaaatgccttttgctgaatcccaactccagaacctgtgcgcgtgatcatatctggaaaaaaaatggggggtctttgtagatggaatcaagttaagagacagtcagagtggatcagggtgggccctaaatccaaagacccgtgctcttataagaaaagaagaggaaaccgaatccagtgttagacagaggccccggggagaacctcgcttattcgttcatcacggagcagagatgggagtgatacatccgcagacaggagccccggggactgccacagccccagatggtgagggctcctcccaatgggtcccagagggagcacggccctgcagacactctgatctccgtcaaactcctgggctccagaacagacagaatccatttccattgctttaagcctccaggtttgtgatactttgttatggcagccacgggaaactgacacattgaaaatggcaattttgaaaagcccagaaagcaaatatgctggaagaaaaatgttgacttagatgtttcttggtaacctgacttcttagtaactcccagaagtgacttttttgaaaaggaggttactcctgctagggctgaaagttctctgttccaagcttgccttgtggatggaggagctgcttccttgcagaaactctggggttaatatcaggaccctggaaccccatgcctcacccttgaaaggcctccctgcaggccgggctgtcatctctcaagcctttcacactgctctgctgtaaggtcataaaaccgtcatccagatgcagatgaggaggactagcgccaaaaaacacaggctataaaagtgttagggccctaaactataagccataagtaacgccatagaagccgccagcacttccccgggggcatgacgcttacaggaggtgtgtggggttagagcctttgccagtgtgtccatttgtaatgatgtgtagaggggggaccaggtttggggctggatctcacaagggacattactgaaaatggctctttagggaatcgtgtgtatttcttcatccaacaaacatgaagagactcttctgcacgctgactggccatgcactggtgtaaaaacagagacgtccagcctgcttggagcttacggtggcatggggagggcgggtggacagctaaagcaggtggtgagatcccaggggagaggcaggtgtgccacagccaggcagtggggtcaggtgccagggatgcgtgggtctgaggccggggcaatcggcgggtaaagggatattaagggaacacttgaaaaatgagcaggagaagggccacatgaggggcagcatgttctgggagagggaacagtgcgtgtggaggctccgagccctcagctgctcccgggaacctgggagtctcggctgggtgggttgctgctgggctccggcacagggcactctctgcagccaggcggcctctgggtgaagaggacagtgccagctctccctgggcacagggctcccctggctgcggccacagcccttgctcatcccccgtctgccctgccgggctctcttcctcgctgctgtcttcgcttcttcggcctggcctgcactggccctttggacccgtctcccgggtctgtgtcccctctgtccagtgttcctcctgccctgttctgcccacacaggacccctggcccccacacccagccttcctgctgccctctgggtgggatgtcccctttctccaggacactcatgggtcccctgtcaggggcgaggcagtctcttctactcccaggacaactgtctgtttaggtggaaaaacattggcttcctggcagagccaccaggaggtagggaccctgggaaacaaacccacctcctcctcctcacccttccttttggagcagttcaagctgtacaaagcccggagcaccagccatgggcggctgctccctcccccggcccctgcagctggcagcagggccctcccacctcctcacatgagctgctgggcagccgtggactcaccccacggttaatcccattaacttcaaagctcacgactcttacctcgcagtgtgcccggggctgcgcccaactccccatttgcagtgtctctgtgaaggtgccaaagcccatggccctcagcccgcttcacagatggaaggagcgaggctcggtttagcaaggtggttgccgtggtcactagaaagtgaaggaggagagctgagcctggcctgtctccacaatggatgcggtaaatgcctgagggctgctgtgtcaggcaggaaccaaggggatacagtgctggggcctttacattttgtcagtggtgccagcggtggtgccctgcccatatgttggccatttgggaaaacagcagccatgtttgaaaacacattgcccctttatttaaatgggcagctgctggtactcactggcctgggcgtgtgcattttgctgacatttggggcagacccttctgttgaattctcgatgcttcgcgaggcctcttgccttggtcatatgacctccagagagtttttgctgctttttaagtcgtttcaagcgattattctccggccataaaactcagctttaaaaataggtttcataaaggccccgacttttcttctaattagtgtaaagatttattgaatatacatcatatgcacagatcataatattattaaaattactattaagactttacacatcaaaatatttcaggcagtggggagacaggaagcctgatggtccctgagaatcgaatctgcattggcaagataaaggacaattgagggcgattacaaaagccatgatttagagtacaacataaaactctgctgagaactaattcgtattgccagctgctgctaagcttcttaatctttatctagttcaattaaaatctgaatgtttgggatttcattaacaaccgggggtttggaaattacatgcgcttttacgccatacttccgttgctgactgacaatattggaagttgcccaaaacgtctccaggtagacttatgtataattaaaacttaagtatttaaaggctaatgcaaaggtaaaagcagattgttttaatttgcaagtcagatccgactgacaaagtaaggagactccactacaaacggtgccccttttgtggggagagagagcatttagtaggccgaggtctgggcggtgacctgcagctcatggtcgagccctcaccacagggccggtttccgtgtgagggccagggagctgctttgggcatcttcttagccactggggaccttgtcacgttcctgtgtgtgcagtccgtatcctcactgtggtgcagatgtgtttgctgtctgccaattcattatgcgttttcaagactttgcaagcaggtctttctaaaattaaaccagccaaagtgatgaacaagcttaacgcctaacttcagatgaacggtgaaaagcaaaagcatccaggatgtttcctgtatgtgtttccttggcctgggttggggggggtctgttgtcacaaacgtcattcttcacaggagaatgggagggtctgactgaggttgggggtgggggcagggaatcggcattgttgtcccctccatccctcaagtcatcctgagactggttggtgcctcccatgtcctgcatggcccggagggatggctgcagcatttgggtctgtgtgagacacacctgtttcggttccctgagcatgggaggtagaacagggacccccaaagatgccccagtcctaatctctccacctctgaatgtctcaccttgccccgcagaagggactctgcagatgtgatgaaagtgaaggatgccgagatgggaggttatcctggttggtgccatagaaccccaaggtcccttccaaaagggaggccggagggtcaaggttgggaggagaaaatgtgaggagggaagcagaggttggagtgatgtgaaagaggccatgagcccataacacaggtgcctccagaggctagacaaggaaggattctctcctggggcctccccagcatggctgacacttggctcttggcccagggaaacccatatcagacttctagcctccagacctgcaagatataagtgttcacattaagccatggggtttgtggtgacgttacggccacagtaggaagcagatacaccctgagacccaaagcatgtggctccccttcctatgcctgttctctcagctgtgaaacaagagtggagagtggtacccaggcgttcttgtgaggatgggcgagatggtgaatgtgtcaccagcctgggtcaaggagggcgatattagccatgagctgctgctggggtggccttcctgctgctggtccaggtgcctggcctggtgctggtcaaggccacgagtcctctgcaagagccagggcaggggtgggggacagcaaggggctcgaggcacagccgtatccacgccctgccccgtctggccctgctcttgccatttttttccagctcctctggctgcccctcttccccttctctgcctcatcctcaccctcctgcttctcctgggttcccagcaaggctgcagcagcaggacagggatccaggtgggcccccaactggtcatcttgtgatttggggggtgtctgctctctccggtgccagctctcctgaagtcctcttctctctgccttctcacctccagcgccattgcttaatttccctgtagctcttttcaggggagcagggaggaggaggtaggagctgggctgagatatgtggagcatcactgtgcatctgtgcccacccccaggcccgggacacggaggcaccagtgggaggagcccacggaagtccagtggggcaagctggaaagcgagccttcagcagcagcctggatcccaggaggtccgatgggcacggtgccatcctgttttgtttacttaggcaacacgtgcacctcctcttaaataatagaggctacttcggaacggagttgacctggggctgttcttctgaaggttaacacggccgtagggataggctcctgccagtggcttcatttcacacgtttttctgggtggtgatgtccccagttctatgggaccctcaaggaacccgtgtcctggggcctgggaaggaaaaggccaggcattcctttcctcagctgcagatcaggaaactgtcttcacagccccaggcttctatgaagacgaatcctggttttaggtctttctctgcccatcctccgaacgcagttctcagcagtcagcattttggattgaagatagtggacggcacccccccaaccccccgttctttggtgtggtcgttataggagtgacttcctaggtaatcactgaagtggccagtttttgttattttacttcattctgatactggttttctgcgtcctagttttattatttcatattacattgtattgcttcataatggtctgcgtggttggcttctctaaacgatgagcccctggaggacaggacgcctttggtcgtgttgtgtgtgtgtgaatgtgtgtgtatgtgctgtgtttgttgtgttgtatatggtgcatatgctgtgtgttttgtatgttttgaactctgaattgtactagagggcctggctgtgccataacaatattaagaggcctagagaaaaggacagcagaaggggtgctattggcaggaggtttataaagtccaggagcaactagagacgatgtatttctagactatgtatgtactagagcctctgtgtgtgcagtgtgctgtgtgttttgcatgcagtgtgcatgttgtgtgtgtggggttgtgtgtgtgtgtgcaatgcatgtattgtgtgtggggatgtgtgtacagtgtgtcctttgtgttgcgcatgcagcacgtgtattgtgtgtgtgtgtgttcggtgcgtgtgttgtgtgtgggatgtttgtgcagtatgttgcgtgtgttgtacatgcagtgtatgtgttgtatgtgtgtgtgtgctttgtgcatgtgctgtgcgtgggtgtgtgtacagtgtgttgcctgtgttgggcatgcagcatgtgtgttgtatgtgtgtgtgttctgtgcgtgtgttgtgtatgtgcagtgtgttgtgtgtgttgtgtatgcactgtgtgtgtggtgtgtgctctgggcctgtattgtgtgtggggagtatttttcagcgtcatctctgatgttgagcctgactgtccgtaagtgtgtgtttcggtggatctataaacctgcctttttgttttgtgatttttgtttttctttgtctgggggcagagggggaagaaaccttccacccagcgtggctttcgagatgcagggccagtgcacctgccgtatcttatgcagcgaccttacagtcttcaggcatctagtgatcagtgtgctgtgaaccccctggaaatcctgctgaatgcggattcccactcccgggggaggtggggcctgagagtctgcatttccaacactttttctctatggatgctgctggtgtggggaccacacttttgcagcaagactttgaacagcctgaggtcctcacgacattccaagtccctggaccaattcctaagttattaaaaataaaactcccttgattcttttcaattctcttgacctcggttcacgaacctctctcttccccttggtctcagagcttcccagggctttggtggccatgagtttgtgcatttccagatgtcatccagctcaccgctcacgtgcacctaagtggctgggttaacatcaagatcgaagggagccaccttgatctggagcttgtcattttcatgaaagatgctgccacatcacaaatggatttggcaaatggctcgccaggagatccgtgggagttcagagataactgaaaatatgatctatatctgtatatttggcttctagagtgaagatcggcccacggattgatctgataggggtgataaatatatagtccctagttgctcttggactttgtaagccttctgccaatagcaccacttccgttgaccttttgtctaggccttttgatattcttatggcacagccaggccctcaagtacagttcagagttcaagatgggagtaggctgtgggtttcagatcctggccatcacgctcttgaaaactttgaaggcttctgtccatctcttcttccttgcttagggtttcatctcatctgttgattttaagtcttccaaaggttgctggaaagcatgattagatagatgattgtgaatctggactcaagaaattacctcagaatattatacgtaaaacattctagattcctttaaaaatgcagtttactctgcaagaaatggctgatttgctactgagtgatgccggtaagttttcttttttctttctttttcttttttttttaaacggagtctcgctctgtcacccaggctggagtacagtggcacgatctcggctcactgcaacctccgcctcccaggttcaagcaattctctgcctcagcctcctgagtagctggcattacaggtgcctgcctctatgcctggctaattttttgtatttttagtagagatggggtttaccatcttggccaggctggtcttacactcctgaacttgtgatccacctgcctcagcctcccaaagtgctgggattacagcgtgagccaccgcacccagccgccattaagtttttacaaacttttcattgtcatatacacaaaagcacacaagttgtgagtggccagatggtgtatcatctcaaaccaaacacacccttggggccagcaccgaccagtcaaacactggggcacggtccactctccctggtcctcacacccttccacctggatccactgcagacctacagctcagcgttgcctgatttcgaactttgtgtcgacagagccccacttcacctgtacgcctggcttctttcctgagccgtgtttggggagccatctgtgtcctggctgggcgggacttctcatttcctccttggtgtggctatgttgtaggtgggagggctagttcaggttcttaactttgccatacaaaagaatttgagagccagtccatagtgagagtaagcaaagaagtttattggaaagcaaaagtccactccgagagacagagcagcggctcagagggagatagcagctgctgccttaggaggaattcctttcatgggagctgtatgtgaatattcatgaaatactgctgaggtcggggatgcaaaggcggatctgcagttggagcttgcactcagcacctacatgctccaacacgccttgcatgtatcattaggcactcagcacctgcatgctccaacacacattgcatgtatcaggcactcagagcttacatgctccaacacgccttgcatgtatcattaggcactcagcacctacatgctccaaaacacattgcatgtgtcattaggcactcagcacctgcatgctccaacacacgttgcatgtgtcaggcactcagcacctacatgctccaacacacgttgcgcgtatcattcgcatactaggtctctgcctaggggtgtgtttttcactattaaaatgaggaaaaggtcactataacctgaatcttgaacctagctgggcaggctggacctcgaagaagtccctgccccatccacctgccccaggcaggaatctgtagctactggcttcttgggatttgtatgctgattggctggatattggggaaactacatcaggaagaggggcttttgttttctttcctgggtggtcctaggtgtcctgagcctgtagcctgcctgtctgctggtgtcctgcagggctggactgcttcccttccaaaagagtgaggtgctggcatgggaaggtgtaagggatgtggagccagccgggctccacccacggggacaagtcagtgtggcctgatctcacatatcctgcctggaaatgtgccaggcttgatttgtccagtgtactcttcacagatatctgggtgtcactagtggtgtcaccgtaggagctgtcatatgtggtgactgcccactgaacagccacatgccgagtccaggcatggagagcttctgaaacacggctctccctgtggaggtgagatgaccagaatcactgtagaagtacaaggaacgtgtgaaactgcccagtgtgtcagggctgaacctcactgcccagggggcgggggcatgcaaatattcctttcgtctttttatggccccacgtgagcctcttggttttgaatgtatgtagcatacattgacacatttgtaccatgccagggtggtgtaattttcaagggttctgcagatgagttctttaatattaaatactatgtgagtgcacatacttaaccaaagctgtcacaaagctgccatgagccgcagcgctgagcagtggacttagtttcatgctgattgaattagtgggatccgatgtcttttgtggggaggagaaggcagggcgaggtgaagtcggtgacaccctccttctcattgcactgtgcaggaaagctgtgccgacaattaatctctgtccacctgcaaactctggcaaaagtcagacaatgccagcagtctgtgggatttttctgctgaaatggctgctgcttttctgccttggcataatttcctgtgcctgggagtgatgggaaatgaggagcaccggggcttactgtttggcaccatccagacaaaatgcttagtgtgtttccttgtctgatgtggttttcatttgctaatgtgaacctattcagtcaccttcccaaggccttctgtcaaaactgaatttgatgattgcaggcggaggagaggctgagcaggaagatttctggaggttagactttgctgtcagaaacctgttgcagctacttcaatgcccctcttcctgtacatctgaatttacttaagccctgatcaaagggctgggctatgggaagcagagctcgtagcctgtggtttgcaggagaattgattcctgcctggatctgatgggaagtccagcagaggtgctctgaggcctcccacttcctgacagacctcagttggagcaggactgactgcatgttttcgggcccagaacacagtgaaaatttggagccccttgttaaaaaattactgaatttcaatatggcaacggcagagcatggagccaagcacagggcgcttctgagcgcgaggctggccctgtgcagctcggctggtgcccaggagatcctctcatctctctggagctgggtcctgaggccagctggctgagtgctggggtcctggggctagggggctgtccctgtaggggtgcagcaggagcttgtgtgcaggctgtggcactgagacatggatgggggcgcctcactgtgatgaccttgcaggtgtgcatagaggtgttcagctgtcttcctcgagtttccagaaccatgcaggtgtgcatagaggtgttcagctgtcttccttgagtttccagaaccatgcaggtatgcatagaggtgctcagctgtcttcctcgagtttccagatgccctgggggccccctcctcctctagatgttcatttgaggcattttacttagcagtggatatggggttgagaacacagtgatctggaagcaaggcaaaaaaaggagggaaaaacttaggaagagaaatggtttatagacaaaactttgaaaagtttccccaagtggtcagtacctttttgtgttcctatttcagggaaatgcatgaacttaattattctatttagtggggatttgaacagtataaagactaatttgtagattcccttgtcctttaattccacaaaagcttcatgaacatatagcaagtgccaggccctgtctaagtggtgaactaagcaatgtttcagaaagagttaggacagtttcgtcctattgaatgcattacttgggagccttagggatttgaaaaatctattaaagagaagaaggacatggagcagaagtgtggcaggggctggccaggtgtggcagaagctagggtggcctctccattgctctctctgctcccctgtcccctgcaagatgaatttgtttgcaggacagctctcctgcggcttacagaaatgggtggccttgtaaaattccaaagttcgtgccagttggatggcttaggtcacctgcccccctccaaagcccatgggaatgtgggctgcaagatggtgccacctggaaccagcccagagccagctggggtgggtaggctgagtgtcttcagcccactgtctggttgggggtctttgctagagtgggtgatgggggttcgtcttgcacaagccaggacgggagggcaaggctccatgtcctactcagctcatgctgccatactaagtaccacaaaccaggtggcttcaaccagtggtccccaacgtttttggcaccagggaccagtttcgtggaggataactattttatggacctgggttgggtgggggttggtgtctggttgaaactgttccacctcagatcatcaggcattaattagattctcataaggagcgtgcaccttggatccctcccatgcgcggttcacagtagggtttgcactcctgtgaggatctaatgctgctgatctgagaggaggcggagctcaggcggccatgctggctctccagctgcccccttcctgctgtccagcctggttcctaacaggccatgcactgccatgggtctgcagccccggggttgggtacccgcagcttaaacaacaggaggtcgtttcctcactgttctgggggctggaagtctgggatggaggtgttggcagggttgggttttcctggggcctggctctgtggcctgcagatcctgtctcctttttgtatcttcccatgattttccttctgcgtgtctgcgtcctagctccctcttcccacagggacaccagtcacctcagattggagcccaccctaaggacctcattttgccttaatcaccacttccaaggccctggctccaaatacagccacgttctgtggtactggggggtagggcttcaaaataggaatttgacggggacacaggtcagccctaacgcttcccaaggtgtccccaccccactccactgcacagtggaggcgggtggtgtcctggtcctcctcgtttccatcagatccatacagtgaagcgaacctccggtgactcaggctcagatgttctgggtgagatgggtagttagttgaattccaagtggatcaaacgtttaaaattagctcattaaacacacacccacacccacacacacccacaccagcaatgtgtgtttatctgaactttgaataggcatggagaagttcttgttgaacagaaaaaaaagtaatgaaatcagaaaggaaaagatggatctgactcaataaatattttagaaataaattttattaaaaaggtttcacattaaaaggcaaacatattgggaaaataatttctacaaataatgaggaagaacttctcacctttccatataaagatgtaatatagactggtgagaacaatgcaaattaggacagtgcccaaagtacaaaacagcaaaattacagaacagcagattcagatatttagtaaacatagacaaaacatgttacacctcactagtaaccaagggaaagtctagaaaactgtcttaccactttggtgttaccaattaagcaaagtttgtgtttgtgttaattttcttttaattggtttactcaaaactggccaagacctatgggttggatgtatatgctgcatcaagaaatgttaaactgaaattgaaaaaaaaattgacgaactatctcaagggccagagaaatggttttgcggttttactcagtgattcaagttcttgtcaagcctgaaaaaacaaaacatctgaaagtgggtgggagtgtgtgggacgcgccagggcggggcggccagtgcatggcacagcaccctggcttcctgcggagccggctgcatccacacctgttcctcctgtgcccgagcctgtgaggtcattgtgcgtgcacatgtgtactgtatgtgtttacatgcctgcatgtgtgtaatgtgtgcatgtgttgtgcatatatgtgtttgcatgggtgttgtgtgtgagactgcatgtatttgtgatgtgcacatgtgtggtgtgtatatgtatgtgcatgtgtgtgatgtgtggtgtgtgcatgtgggtggtgtgtgtgtggtgtgtgcatgtgtgtgttgtgtatgcgtgtgggatgtttgtgatgtgtgcattttgtgatgtgtgcatatgtgcggtgtgtgtgtggtgtgtgcatgtgtgtggtgtgtgtgtatatgtgtgtaatgtgtccattttgtgatgtatgcatatgtcagtgtgtgtatggtgtgtgcatgtgtgtggtgtgtgtgtatatgtgtgcgatgtgtacattttgtgatgtatgcatatgtgtggcatgatgtgagtggtgtggtgtgtgcatgtgtgtgtgcatgtgtgagtgtgtgcgcccattctgcttggtgatcatgggccctgcctgggaggcagagtgaggagccgccagcccccgggtgcacaggtggaccttccagctggtccgtattggggaccccttgcccctgcagtccccaccatcaggactgcacccccttctttgctgaggcccagctgggagtgactttctcgctagagcctggccctcctcgtgagaccctactgtggtcatctctgatggcttggccagcgttctccttcctctttgcacacgtcactccttccagctactccatgtccgaggatgtgagtggttattaattttgtgcagcgtatgatgaccccttccagaacagagctcgagctctgccccctagagcttgtgggacgggacaccaaagtgcctgcagtccctcctctccagcctgcatttcccacccatcctcggcttgctcttgcctgcccagtgcagagaagcgagcttgcctgggattgcaggggtgctcggcaggtcctctccctcgatccaagctttcctaccccctcactgcctccagggcctgggggtctcactcctgtggggttgcggtgagcccttccctatccctgccccagggtggcccccagtgccttccaaagaccgattctaatactgcagggaggaaatgcatagaacaggctggctctgctccaacgtgactgtgctatgcgggctcatcgaggcctggtcgtgtttgaaatctcatttatttcaccactctcaatcgtgcactacgtggggcctggcttagcccgagtgtctgatgagggatttgcggagtggttcagcatgcttcactgtgagtctccagccaccagcaaagggaagagcccggagacccagaagcagcagggagggttctggagctggcacctgcagccgggtggggaagtaggtgcgagcactccccgggaagcctacacagctcccttcatcttttaaaatgaagggcatctttcgctctcattttttagttcaccattgagtcgcccttggcacgctttgtttttcatctaaacaaaccctgtcgggaagccaccaggcaccaggcgtgtctcacagtgcatggaccactgcgtgagagcagcgtggatttcacgatcagacggttgcttgcagcctgcatgagatgaatgagcgctgtctgccctgggaacatcacaggggtggtcacagtgcagtgttttggggtcacttttggttttatgaaggtataattgacaaataaaaaatgtatatatttatggtatacaacatgatgattttttacatttttgttatcattttttgtttaagacatggtctcgctctgtcacccaggctggagtgcagtggtgcaatcatagcccactacagcctcaaactcatggcctctagtgatcctcccacctcagcctcctgagtagctaggactacaggtgcacaccaccatgcccagctaatttttgttttttgtagagatggggtcccatcatgttgcccaggctgctttcaaactcctgagctcaagtgatctgtgcaccttggcctcccaaagtgctgggattacaggcgtgagccacagcacccagctaacaatgtgttgattttatatacgtatgattctccagatcaagtcagttcacatctccatcacttcaccttgttaccttttgtggtgagaggtgagaacatttatggtccgttccttttacagatttcaaattaaccatacagtgttgctacccctggtctctgagctgtaccttagatccccagaaatcacccatcttagaactgaaactttgtcccctttgaccaacagctcccctctccccactcccagccccaggcaaccattgttctattctctgcttctatgagtttgacgtttttagattccacgtagaagtgagatcgtgcagtatctgtctttctgggcctggcttgttttatttagtatcgtgtcctccagtttcatccatgttgttgaaatgccaggatttcctttcttatggtggattactagtcccttgtgtgtacgtgtgtagaccacaattcatttgtctgttcgcccaccagtggacactgaggtggattccatatctcagctgttgagaagaatgtgctgcaatgaacttgggactgcagggatctttttgagatcctgacttcatttcctctggatagatgcccagaggtgggaccactggatcgtatggtagttctacctttaatgttctgaggaacctccatgctatcttccataacgctcatcccaatttatcttcccagcaacagcggaggaggaggaggaggcttcccttttctccacgtcctcaccgaggcttgttatcctcgtcgttttgacagtagccgtcctaacaagtgtgcgatgacagcgcattgtggtttgaatttgcatttccctggtgattcgtgatattgagcactttttcataaacctgttggccatttgtatatctgtgttgagaaatgtctgttcaggtcctctgctaatttttttattacattgttttcttgctattgatttgtttgcattccttatgtattttggctatcaacacctttattttaaacatgactcagcccagatgggtctaaacacgaaagcctccactcacagctggaagctccatgccagactcctcctccttgggctcaggtgcataggggctcaagggggaccggcctcatcctgaagctcatctcatttctggggctgcagtgattgaatgggttgggtggggcttgtgatctggatggggtcagtgagatgctcatggctttctggatttctgggaaagaaacgtttcctcctctgggcatgaggcaggaagatgccagaccgatgcctggtatccaaaaggagagaaactgggggacattgagcttccagtgagtgtggagctcagagcaaagagaaagctagccctggggacaggtgggtgccctgataaaaaagaccagaagccagccagcctcagacagattttcagctgtgaaagcccatcagcccggcttcggtgtagccaggtttctgtctccagctgcagaaagaaaaaggacgtgagaattgaatgatgccaagaaactcgcagaaccaggcaggaggatgtcggggagaaacgaggagtgtgctggacctgttcgtcatgaggctccctctctgtctcgtgacaaattgacaaataaaagttgtatatatttatggtatacaacatgatgattttttacgttttcattatcattttttgtttaagacatggtcttgctctgtcacccatgctggagtgcagtggtgcgatcatagctcactacagcctcaaactcatggtctcaagcaatctttccacataagcctcctgagtagctaggactacaggtgtacaccaccatgtccagctaattttttgttttttgtattttttgtagagatggggtcccaccatgttgcccaggctactttcaaactcctgagctcaagtgatctgcccctgggtggaggacttccaagggaacaggcgatttccacagggccctggaagctgggtttctgatgcaggcactgaggggctctccagggggaggaaggatttggcagcttccctttgaagacaggactcagttttcctaattcacgtcctcctcttcctcctgggtgctgttggcaagttcctttgggttaggatggggcaggtttcagggcagtctatgaaacaagaaatggaagtttacttcccaaacagaagggcaattttggatagacttcttgacagatctgcatttttcaaaatccaatccatcggaagaagttaggacaaggaaaatctaattttctggaacatcggagatggaaaaggcactgcggcccgcagatagagaccgccgcgctgacctaagtcgataagttgaaggctctaacaagtttgaaaaagtccacttggccccctaaatcaagttcaggcggcagaacaaatgtgttgttccaacagagacggaacaaacctttggctgggaggaagaataaagtcatcagctccctcttatcaggtttctgtctctctcccttcccatctgccatctgctgcatcctcgaagcagggatcgctttgcttgttaaagggaaagtggttgcttttcagcgcaattaatttagtaggccacaaatgttgctgactgatgggtggaaggtttgatcaaacagattggttaattggtagtgaagaaatgctggccatgtgaaaaaggatgaaagtgaagttggactttgctgtcgttagagccgccgcctctgcttttcgggtgaggggagtttctctttctgagtcatcgttgcccagagctggggcctggccaccctttttgttttagccatttgtacagcatgatagtcacagccgagaagcagggctgggtggggaggcgcctggacgtgggtcctccagcctccctcaggtgcgtgcagcctctgtacctgaacgtctggcagcagcctttaaagacgtgccttgcagtggagtgataagtcttgcacgtaacctgctatttctttttttttttttagtttatttatatacttattatttttattactatttagaaatctgaataccatgttcaaatatatttcctggccaggtgcggtggctcatgcctgtgatcccggcactttgggaggccgaggtgggtggatcacgaggtgaggagatcaagaccatcctggctaacacggtgaaaccccgtctctactaaaaatacaacaaattagccagctgtggtggcgagcgcccgcagtcctggcagtgacttgatcttggctcactgcaagctccgcctcccggtttcacgccattctcctgcctcagcctcccgaataacctgctatttctaacatgggataaattaaggcgcctttgccactgagtctccaggtgcctgcactgtaaattctatcaaatctgtttgcattgaagtgtttattagcagcccccaccctcgtgacctgattggatggggaggtctgtggcccattgcatctcccagctcacgtgcctgccaaagcctgcattcaccattgctccagaccaggtttcctgacgccacaggcatggggggctggatgagtctgtggtggggcgtcctgtgcactgtatggtgttgagcagactcccaggctggcacccactggaggctggtagcacccctcccctaggtgccacaaccaaaaatgcctctagatgttgcccagtgtcccctgggagcagggaccccctttccaccatgcccgagacccccacggttctagacaaagggcacttctgggaagcgttttttccgtgtgaatttgtgggtgtccagccagccagcaagggtgaatttgcacgagtttcctcaagggacatgtcagagtggggtaaaagtagagttaatgccccatggcatttagggaaaaacagaatgatccagccattgcaactgtgaagtgttgtgcacacttattggaggaaaacgccaactgtgtttgttcttagcaaacctaaatgggtagaggttaagagacccagagagactaaagggctggagggtggtttcctgctctccgtcccggctggagggacacttttcacctgaaacctggaggtgggacccatgcgcccccaccctgtgctgttgtggtggcaggatgtgtgaaaggggaactcaccatcctaatagatgttaaactgcccggctcctgtttagacagcagtttgctttgcgttgacgactctcccgtatgttcctctccatctggagtgaagtttcccaacagccccggctttgcagaagacaccagcctgggattcacagtgctcagctgaccagcagtgagtgccagcggatgcagccttgggttttgtttgatcctgtccaagatttactgctttgaatgattcaaaaacctaagcgtgtgacaatgatttgaactgacgttctttttttttctcctttaccccttgcctcatctcttaggattaactgggactctcctaagaaaaccttatccatttggttttattattagatcatgaatcgggtagggattgctggaggctatgatgtgggcatgcgctctagaagggcaccatggtccagaaggcctggttcgtgcccaggaggagcctggaatcagtgatactcagtcagaatacatgctcaatgcatagccactgatgaggaaattagaagctcagtgaggtcaagaagcgtgttgagctctttggctttatgttattaattactaccacttgtttggcacagagagagtaatccctggatatgcactgattgagttgaagtggtgacttgccccttttcccatgtaatgtttcttttcattcgtttattcacaaatgcccagtcaccctctctgtgcctgccactgcacagatgccggtggtagagagctgggcagagacccctccttgcccgcaatgatgctgccatcggcctgagccatggtggggcaccacacactgatatggagatgctgcacaccatgcatgtcacatgatgccgtgataaacagatgacttagtttccacgatcttaacaggtgacagcactgagcgcttgccctgtagctgccaaagacgctcacctcatggtccttagctcagccctctctgtagtattacaataagcataataatataacatataaaaatataacatataacatgttataataaatattataatatataataatacaataagcaggtgcattattatccccattttacaggtggggaaactgaggctcaggaaggtgacgtgtgtagggccaaaaggacacactgggattgctaacatttcccaggtcagagaattcatcgattaaaaattccctgttatgctccaccgggaagcagggctagatcgcactgttaagagtgcatcacatgtgcagcctcattcatccgtccaccttgtgggctcatcaaggcttccgtatcttggctttgctgaataatgctgcaatgagcacgggcatgcggaggtctctttgagatctgatttcagttcttttggataaatacccagaagtgggattgctggatcatatggtaggtggttgcctggggctggggcaggggaaatgggaagtcactattcaagggatataaagtttcaattatacaagatgaataagttctggctgggcacagtggcgcatgcctgtaatcccagcactttgggaggtggaggtggatggatcacttgagcccaggagttcaagaccaccctggccaaaacatggtaaaacaccatctcaattaaaaaaaaaaaaaacaaaattaaccaggcgtggtgtcaggcacctgtagtccttagctactcaggaggttgaggcgggagaatcacttgaacctgggaggcgaaggatgcagtaagccgagattatgccactgcactccagcctgggtgacagagtaagactccatctaaaaaaaaaaaaaaatggtgaatagattctgaagatccactgcagaacatccagccaatggtattttgttgagcacttgaaatttgttgaggatagatctcatgttaaatgttcttcccacaataatttttgcaaaattgctcgtatttttgcagcatctcccaggtgggactgttccctctctgcatttatttgggcctcggtgttgctgatgttgcagggcctatggatttccagaagagcctgagggtctcttcccaaggcgtcttatgcatgctgactgtgtcttctccctgcgttccttgtttcagtttttgtcacgattgttcatttgctcattcaaccagcatctttgagcatctgccgtgggtcagacccagtgctaggcacagggtgtcatttttctagtccctgggggctcacagcctggtgggcaagaggagcaccaaccacaaaaccatgcaggtgtgggtgagactggagtgtcggtggggttgggttggcctccacagggagcggtgacctggtggtctcagccactaccatgaaatgttttacttcagccagagggtctcaactgggacagttctgcccccagagagcacttggcaatatctggagacattgatgtttgtgagtgggggatgggggtgctatttgcatctgggaggtgggagcaggggtgctgccaagtgccctacccagggctgcctcccagcagagaacccttcagccccaggtgtcagcactgctgaggtcgaggaagcctggctttagtgagacctgaagatgaacaggagccaagcagatgaagaggcaggaaaggggcctgggcaaagggagcagcgtgcgcagaggtcctgtgctgggagggagtgtggggacacggccaggtggctggaggggtgggcagggctgtggcgtgaagacagtatgtgggcagggcggggtgcacaggctccaggcctaggcgggagccaggggagctcctcttcctgcccctgctgtggggaagtgtcccaggtctctcctccaggctggctctgtccagctgctctagccttttaaacccccgggtccttccccagggtcccctgacaccgtgggtcctcggtggggtggcattgacctacctagtcccgcctgtggtcagccacaccgcacatttccacctcgagagcgcatgcgagagagaggaagagagagaaggctctgtgggtctcattagtcgttgattgaggtcagagagctctggcgtttatttaactctgcaaattagaacagttaatttcctgggaaatgaatagagtcttctcattgatctagggaagagcgggtttcaccttaggagggcagagggaggaggcgaggcaggttctgctaattccagaggcggggttactcttaacaaaaaacggcttgattatctttgcttttttgctggaaatttttttttaatttttgatgtcttaaaaaatatagccttggaatgctaatgttgttaagttttccttaaaacatttcacattgtgtgtgtgtgtgagagagaatataaggatttttttccacgggtcagtgtgtttggaagacaccacgtggcctcatctcccttgggtacttgggtacctgatgtatgtgctgacaccttccatgtagacgtgcggtgagcggaggacttccggcttcgtcaaattcagccgttgccactatttgatggcagagccgcctccctggagtagcctgcagaattggtgcttctcagcacaggcctgggagatgctgcgtgccacgcatgtcacatgatgccgtgatcaacagatgacttagtttccatgatgttaacaggtgacagcactgagcccttgtccaatagctgccaaagacgctcacctcatgttccttagctcagtcctctctgcagtcttacaataagcataacaatataacatataagaataatatattgtagcatatattataataataaatattatataataatataacaaggagctgcattattatccccattttacaggtggggaaactgaggctcaggaaggtgacattgaacatgaaaccccatgcttgaggttacgtggttggtcagaggtccccccaggatacgaaccccaggattcgggtccagcagttcttccgggtccttgtacttgcttcggggatggttatttattcattcagtgcaatggggttggtgccgtctgtgtgctttgcactctgctggcctgtggttgggagctaacgttcctcatttgactaactaccccccatcccctccaactccccacatacacaggagaggggaggctgctaattctgcacctgaggcttcgcctggctctgtgggtgcaccaggctcagtctctcccgcagcagctgggaggtgccggcatcaggatccgcagcccacacctgcagctgaactgagcggagacctggctcctgcagtatctgagccgcctcccctttccttcccagactggcatgaagggagaaagaagtcaagattctctgtctccctttacagcccaggatgagtcccttccttggtgcctgaatcccctcctgggtcctggtgtgtgcagtggctgtcactgcagcattcgggatcctggggtgtgctgaggcagcaggaagctgtgcccagagcagcttttgtcccagagccctttccaggcaaggctgtttgccagccacacaatatgttcacttcatccaacgctgagacgcagccaccgaggggtagcatcctggaaggaacagatagatggcagggagcggaacactcacaactggagaggaaagtgacagactggggtgggggcccctggttcagttcccagtggacttgtgcagaggcctttgatcgcagcagtgcatttcttcaagagtgtattggatgctcttcacacaacaggctctatccctggtgtccccttttatgtcccaggctgtcaggaggtcttgttatcttttacagataggaacactgagctctagaacattcaaggatcctccctgtcatttcacaggtgcagagttgagacttccagccagcatccaagggcctgagcttatctgcccaggacgcactgccggatatacccctcgcctctccaaatttgagtattaggaatgacggtggcaagaggatagcaaggaggcatgaggattcccttgcggcacggggtcttctgagagtcagctggctttccctaggggagtgtgcacctagaggacttctcttcgttaggagtgattgccactagctgcagggcagcccagtgtcccgagtgggtggcaggtcagcccctgtcccctcgtcttggcctctgcatgaactcatcacacatttgttcatcagcctgccaggaggggatgtttgggaaagtcttcatcgagtgagtgcttcacctccaccaggcattcatggctcacgtgcagcctgattggaaagttctattcagttggctgaatccatgcacaggaagaaacaatacaccaaacacaaaataatgtgtgatgcctataattctttggccacctgacgtcggagccagtgacattcagcttctgccaccattctgtcatgttacgcgggcctgcaacccctccccacccctgctccctgacggtgataatttaccaagactggcgtcttcgtgggtgttttagtcaccagttcggcaatcagagcacattctggatgcttgggtttctaggttggggccacagggactgtggctatgcaggaacactgaagggggctctccctggagaggaggggcctctcatcttgccgtcacctttagtacatgcaaaatgggtttgttttagctcttgagagcatttcaaagaggcttgttgcaattaatgcctccctgttggggaaattgagattgtatgatcctaagagtggaaggacggagatgataattgtgacttacccagagacaaggcctttgaacctgaagttacgggaaaatattagctctggtgccagcacatttgaggggagatcgcaaagatggtttccaacaagatagaacttgacacagcagttatgccatttacttttgtataaaaatccaattgtctgtccttactggctgccaagggtgtgggagtgtgtgcgatactgagtagggacccagatcgtccaaatgtggtcctggcctttgggtatgaagtgtgtgcctggctgtggagacagatttgcagagggccagggatgctgggcctgagcaggggcttctgtatgtggtacagtccaggaagccctcctggaggaatttgaatattaaattgaaactgattgcattagtgtcctggggctgccacaacaaattttcccaaactgggggggcttaaaacaacagatctctttttctctttcagttctgggggccagaactctgatgtcaaagtgtcagagagccatgctccctccggtagttctaggggaggacccttcctgactttggccagctcctggtggctgctggcagaccttggctgtgggctcagatgctccagtatctgcctggctcatcacgtggcctcttcctggtgtgtctgagtctcttctgtgtccacatttccctcttcttgtaaggacagcagtcatggggttaggactcaccttagtctggtatgaactcatctaatttgtacccaataagggcaccttctgagtttccagaggaatgtgacttttgcaagcatgctgctcaacccagtacaccaatccacaatgaatatgaaagaggagcagtggaggagattctagcgcccaggaagagttgccctaagtcatcttcaaggcacttcggctgtgtgtccatctgcacacctccccatttatagagggtgtggcaggcacttgacccaggagagctttgggacatggaactcgctgggaggccatcaaataaggagatgcaagaacaatttccgagaccacatcgagcctgtttcttaagcttgcaggaagcactcacagccatgcctgcaggggtcctggctcctaccccttgcagctgggggatgctgggcgagtcccgtaacctgccagtgcctcatgtccagagccaccagaggccctttccccatggggctatgtggatgtgagacaagatggaacacatcatgtacatctcacggtgcctgacgcacagccagccatctggaaagagtggacggcatttttgcaacatccttcggtgggtcataagtaagtggtcactggaaaaaaaaaaaaaagtcttggcttttaaagtctttcatgtagaaaatctcttgaagaggttcagaggaagctggcatccctgaattttgtttcacgtggccgtaaggcaaatccaaaggtatctttctctttctggagtgaagttgctattttaaattctgttaatgtccccttacctgtagatagtagggccttgaaatttctcatttttttttctgataaagggcaaaaagagaagtaaagactgcatttcttgagagatgtcagaacgggaggggtgtgttttggggaagagaggaaattcaggcagtaagtggccttttcatcaggtgggggtctgtggggcagggggttagatgtgcaggggacagcatttgagttcttggagagattatgaagccaggagcactggcccagggtggtgcgacttgggggggccacagcaaagcgggccccgacaggaagggttgaaaatgccactcaatgtgcaagagtgtttataggtttaattttaaaaaaagaaaaaaaagcagcgctgtctgtaaagagttccatggccatcagctttggagggctgcctccaacaaagctaacaggctttactagaaaatttcttgaaaacccaacaccatgtgtgcttcttgccacgggtgccgacgcaagtgggttgcctcttttcccaccagagcccgtctggttggcctggtcagtgccgtgccattcccagcttctcgctctccctgatggtggcggtaccggttcaaacccatcaggaagtgaggagctgcctgtcctaatatacccgtgatagtagtgggagtggaactcactgtaactacattttcccttctgtttgttttcagacactaactttaagggacaaatagagtggaggatggagtaaggtggcaggtccaagtttttctcatggaatcttggctcaggcagggatggatatgccaccgtttgcatacttctccaccgcactgccttgttttaggaagggcttagcccaaagtttagctcatactaggttttgtgaacatattcaacaaataaaggattgagtgacctgtttgaaacctgttggtttgctgattaaaaaataagcataagaggaaaattgctgagaaaaaaatgttattttatgaaatacacaacactctttccaatatgttgtgtggcttcagaatcttctggaaatcctccgatagtctagccagaggaggatatgacattttagtcaatcaatggtgcaagcatcaccctgaatctgtcacagcatatgaagtagataaccagttaaaaaatattcagtaaaagaaaatcaaactagccttaaaattacactgtatggaattccattcttccttgatccagaaggcacacaggtattctggaagacactgggggtcatgggagagcctatgtggctgcatgtggggtttgcaaatgtgctgactgagtgtcgggtggtgaaattccacaggacacagcctctcccacaccaggtcacatcaattggtatcaaaaatgaggtttttttttcatttccttggaggaaaaatgtatttgattttaggtggatagaaggcactggtaaatgcaagatgtgttacttcttacgacttctcatctcagtaatcctcagactcagcaagagccagctgtgaggtgtagtaagatacatgaaataactattttcagtactgccttcctatatgtcatctacaaacaacctgcttgtcaggtgcatttttactggctagaagtttcaagatttacctccaccaggcaagattaccccttactcttcatcctggtctctctgagccattctgcagcaaaggagagggaagaggtagccctgggatcctgtgagcattgtgtgaagtggtctactggaagcaaatgatggctttgaaatctcatcttttatctaaaaaaatgtatccacccagaagccataaaagaaaaggcagatatgtgtggctatataaaaattgaagttcttcactgtcaaaacacacaatttcatttttatagaaataaatagaaacctgagcaaaactttttaaatatatttgacaattttccttgataaataaagagctctttgaaatcaataagataaacacccacaactcaatttggtggaggttggggatgttgaagaaagagaggctaaattctgtgaaccagtggagaatggactttaggtgattgagaaacagttttaaaagatactcacatttactacatgcagaataaaactctgatctcctgtttgaccagtcagattggcaaagattagaaagttctgatctcctgtttgacctgtcagattggcgaagattagaaagtgggtgctcagggctgggaggctgtagggaaatcgattctcgtgcagggagttggtggagtacaaattgcacattttggatggtcctttgacagcatccaccaagatgtaacatggacacaccctttgacccaataattccacttctgggaatttattctatagatgtacccacaggtgtgcaggggtcttcactgcagggctatttataataggaaactgaagattacacacatctctagcagctgaggactgtctcacctcactccagagcatccacagaacaggacaccagacggcttgcgtaaaggatcaggtgtagttttatgaatggccatggaaatttggtcaataacggatcttaacgtgaacaaagcaaattcacaggacaatactgatgcttttgtgggagatggactgtatgtttgatgatatttgtgcttatatgtgtttgtacaacatttttagaaagatatttgttaaatgtacagtttagctagggagcaggttagaggatgcagggggacaaagaggtctttatttatgtgaattagatagagtggactcaaattactctctaataaaattgctattttttaaaatttttttgagatgaagtctcgctctgtcacccaggctggagtgcagtggtgcaatctcggctcactgcaacctccacctcctgggttcaagcgattctcctgcctcagcctcccgagtagctaggactgcaggtgcatgccaccatgcctggctaattttttgtatttttagtagagatggggtttcactgtgttagccaggatggtctcaatctcctgaccttgtgatccacccgccttgacctcccaaagtgctgggattacaggcgtgagccaccgcgcccggcccaaaattgctgtttttaaaaatagttttgccaggtgcagtggctcacacctgtaatctcatcactttgggaggccaacacaagaggattgcttgagcccaggagttcaagaccagtctgggcaacatggccaaaccccatctttactaaaaataaaaaaagactagctgggcatggtgtcatgtacctgtgttcccagctacttgggaggctgaggcaggaggattgcttgaacccaggaggttgaggctgcagtgagccctcattgtgccaccgcactccagcctgaagtgacagagggagactgtctcaaaaataaataaattagttaattaaataaataaaaaatagtttgctcaaggaggaccttggcctttcctattagctctgaatgatgaaaactcccattgtacagatgctccttaatttacagcccaataaacccattgcaagttgaaaagatagctagttgaaaatgcacttaatacacctcacatgctgagcatcatggcttagcctagcctcccttaaccgtgctcggaacacttgcaggatcatcaaacacaaagccgatttgatagtaacatgttgagtgtcttgtgcaatttattgaacgctgcactgaaagtgggaaacagacggctgtgtgggtgccgaggatggtttgtactgaacgtgtatcatttttgtaccatcataaagtcaaaaaattgtagttcagctgtcatttaagttggagactgtctgtacttgacagttgatatgaaatattcacatacgttctgcactggaatccactctgctccagtgtttaagcccagtgtgctgcggtggattgcagcatgcgtggagggcacccaggtcctcatggttccctcgtgggtctgggacgcgggtcgaggtggctttaagcccagtgtgctgcagtggattgcagcgtgcgtggagggcacccaggtcctcatggtcccccgtgggtctgggatgtgggttgaggtggctgtgagtggctcttctgcccttggcttctgtattttataataagagagggctcttgctctctctctctctctcctgctttgtactttcaatcaatctctttccagcatagttccccctaaaacatcagaaagctgagtgagcctgtgctctcctctcagagcttagccacttggattccgcagaccctggattgtcactttaaaaaaaaaattaatttaatgtaattttaagttccaggatacatgtgtaggacatgcaagtttgttacataggcaagcatgtgccgtggtggtttgctgcacctatcacccatcccctaggtattatgccctacgtgcattagctatttatcctgatgttctccctcccccccaccccatcccccgacaggccccagtgtatgttgttcccctccctgtgagtcattattcagcactcacttataagtgagtacatgcagtgtttggttttctgttcctgtgttagttttctgaggataatggcttctggctccatccatgtccctgcaaaggacatgatcttgttcctttttatggctgcatagtattccatggtgtatatgtaccacattttctttatccagtctatcattgatgggcatttctgttgattccatgtctttgctattgtgaatagggctgcaatgaacatacgcgtgcatgtatctttataatagaatgatttatattcctttgggtatataccatttaatgggattgctgggtcaaatggttctagatctttctggttctagatctttgaggaatctggttctagatctttgaggaatcatcacactgtcttccacaatggttggactaatttacacgcccaccaacagtgtaaaagtgtacctgattctccacagcctcaccagcatccactgttgtttgactctaataatcgccattctgactggcatgagatggtatctcattgtggttttgatttgcatttctctaatgatcagtgatgttgagcttaggttgtcccttgtgatggtttgattgtcaccagagcagcctgtgctttggttgaataagattcaagtcgttgtaggcagttgccttcaagaaaagtatccgcatgtcctgacggggaacgcctgccttctgggcagtgcacctggtgcctgcggctggctgggcaccgacatgctacagcaggatggccctcattcccacgaacggggtcagaacacggctgccaccttgggaattcgcttttctcacgtgagattaagtactgaaagtgactttcgtataagagcattatcaaagttgcacggctctttgcaaaattctctcatcccttccaatcgctgcctggtttcctgctctgtggttgggctgtacttgcttagaatattcccaaatgataaagattgagttgtttccagtttcctatcataaaatcctcctcccctgagttcccctgcacacctgggagagggtctgtgaaacaagttcctagaagtggaatttctgggtcagttataaggtggccattttggtggatgtcatcgaatgatcattcgagattctgcaatttcactcccactaacacctgtgcgagggtgcatttccacagccaccccacgtgtgggaggatctctgccagggctgcagcagggaaggctgtcttggggctcggcgtctctgtccccatctccttccatgcccagtgcccaggagcctgccatggccacagctgcaccatctccatagccaccctctaaagctcccaccctgggatgaggccctccctcagcctgttctcactgccctctggtcccctgagtcctccccatggtggtcaggaggagactgtgaaaagcatgagtccgaccatgtcactgccctgttcatgcttgcttagcctctgtgtccagtcccttcgccggcacccagagccaactcccactggctggcctggccatctcctcactgtgtctgtgcatcagccacactgtcctttctgttcctcacacttgtccagcatgtcccccaccagagctgtcctctgatctgcccacagctgacatacaggtctcagctcaaaccccacctcctgcctgaccacctgccccaggcccacctcctgccccggccacctgccccaggcccacctcctgccccagacccacctcccgccccagccacctgccccaggctcacctcctgccccggccacctgccccagagccacctcctgccccgaccacctgacagaaatgagatgcgaggcactgtccccaggtcccctgtgttagttacagcactcagcctgcctgcagcagtcttgagcagttctcatctgctggctttctgtctcttcccctggaccgcaagcccttgccgccgtccttggtgctgaacggtgcctggcacacagtaggcgtgtaaaaagcgtgtgttgagggcatgagtaaactcttccaagggaggtcgcctgtgcgccccacagggaagggagctgtgcctctgcccccttctctgccatggttcttcagtgcccagagcagggccaggcacaggtgggctctggaaaggtatctctgagtggacagaggctggctcctggctgagaacacagacactcgacagcgatgcccggcttcccagagaagaggagggtccttctcagtcacaccccctctgccagcctgcccgtggccctcactcctccaggagacaggctttggacgtccatcaggaaggagctagcaaatgtcagtctctcatcagggtgggcggagcggtgacgggtttccttctgggtgtcaaggtctctgtggctatggattcagagctggccaagccaggctgtttccctagagagtccgggaaacccatgatgctggcccactgcacagcgtccccagcctcagggctgctgcctcccatgccctcaacagtgcaaggattcgtgtgatcccagaaggcccacaggaggacctctctcagaagagggcttaggtctccttctggtttctgatctacggtagggggattcttggtgcatccccttggctgccactgccgcctctgtgcctttcctgccccaccctgggcagcaggcactagggccaggtgcagtcagttacctccagttaacttcaccctgcagtgggggtaattgaaggttctgcgaaggcccttggctagtttagagacttctggctggctgccctcctccctgggggtgtgagcatttttgtttcttctctttgctctcctgctttgggtcttgcaggaagttattcgcttcctggtgggtgttactgtccctgccccggctgtggcgccagtccttcctctggcctcaccctgtgttttctgatggtccaggctatttcgggagaaggctgtggtcacagtgctcatcaccctggctttctgctcagcccctgcggaggctgacgcgcccttgccctcacaggccccgagagcctcttacagcattatcctaaaacaaagcttcagcctttcttccccaccgctgggcaaagtctttatttttggaccaaactaaacacttatttgtttgtaaagggtggcgctttttggcttctaagaaacttacctggggttggtggcagacttccttggccttttgagagcagggaactatttttagaggcattgtggcaactctaataaagaaaagaaacaaaggtaggtgtgacaactgcttgtaatcacacacacgtatacacgtgcagacacgcatgcacacatatgcacaggcacatgcacacacacatgtacacacacacacacacacacacatgcacacacacctgcatgggggagctggcaagtttctctttttctggacatttggcaaaatctgagtcatagaaacctcaattcagacattgcaggggtgcgggttgtcaatgtggctcctgaagctctggcttaatgagaccccaacaggcattctttcactacaaaggtcaccagataatccagccaagggggacccagcacagagctctcacctggttccaggaggggtgactgcagtggcaggtgcagccctaagaagtgcagttgtacagggagctaccctgtagttggtgtgtgtggctgaccctctcctcccagagccacctgcaaggacagtcagagcccttaccccgggccacacgtggcccacagagctgccttccctttaccaaaggctgcacaggcctctgcggtatccctgggttgcgctttcaggcgaagagcatcgtgatgtggtttactgcccttgtatcagagtggctcaaaattaacccctgggctgtctgggagacctgctttggaaacacactccacatggctctggtgccaccgttagcacatggcacatctgtgtcctgccagggcctggcaatggctgcatacaggctgcagaccaggggcaccatgaggtgactgggtgggagggggcctcctggtcggtgagggcgggagagacaatgggtaggtaagtcttgactcttcacaggctgagaagggtagcccctgtccatcctgggaggtgtcccctcttctccagctttggagggtgtcctggcctgtgcagctctggtcaccccaagagggcctggaattggagccactgaccacagtaagcctctgggccaccccctctgagggcctccctgagccattctgtaaccccccaagtctgcttcctattgcaactcttgaaacagtgtctctgtcattataaaacctcatctgacctgaaatgaggctcatggagtacttcctatttttgtggtgtctcacataatcacaggtaagtctcacagacctgtgagctggttttccttgttttccaggtgaggatcaggctcagagaggttaaaccgtcactgaggtcacacagcagtgggtggtgcagtgcgtctggtctcttctagtctgttggggctgctataacaaaccgcctgagaccggctaatggataaacaaacagcagaaatcaatgcttacagctctggaggccgggggggctgggatcaaggcaccagcagttcggcatctgttcggcctctttctctgcttccctgaccgtgcctgttgctgcatcttcaagcctctgataagtgcactaatcccattattagggcagaggacccaacccctcccaaaggtcccgcctctttgtgccaccacgctggggctgggtttcaacatatggatttgggggtgggggacatgagcacccacacctctgcagggcctccgtctgtagccctcgcctcctggggtggaagctcatgtcctttgctcagtctgtgagggtcattggcattcagcttttggaacctcaggcttcctcctgtgcacgatggtgctggatgtgctgagaaactccactttgcctccttcatttgcttatgagttttctgcaggaaaccttgagaccttccttttcccaggctgctgagccccaggctccagcctgtcctccaaagacttctcagtaagaggcattctgcctcttaataagcatgatgacagcgatgatgcggctgaggagccaatgagatacaagacatccagcgagtctctctaacgtggtttcgtgttgttcagcatgagccactttacagagttggcaagaggaggtctcgcggccattgacaaatgtcaatatattgatattgatgccttccttcttggcccagccgatctgggatgaatgtgcaggggccaagccagcagtcgtccctgtgttcaacataacaggtaaagctgccgtgtatttggtccaacggagatcgaaggtcattatattcatgttgttcaaaaacttaggaataagccacaggtaaagtatttaaagattacaggcaaagggatgtgacatttaaaatattcagttgcactgtgtgtgatgcacagatgtgattattggcaccatgaataagtcgcatctggcttgggttcctgctagccagttactcagtggggccttccagggcaaggtggtctcaccactgagagggagccccagtgggaccctaattgcaccagcagttgttcctaataagagaactaacacatttctctgaatctccatgactcattcagatttccgtcaagaaaattcaaactgaggtgggatcaataagtcgtgcaaattgtcagaaaactccctccatggagggcatctgagttcacctttagagaaggagagcataatgcgccccacctgaacacttccctggctcgggtgccgaaggctcagggtgtggttcataggcagctatttgtgtaaaggggctagcatctgcatcctgtcttggctattgaagttgtttaaagggtgactttggtaagagctggttctacccactgatgactgtttctgcttctctgatccaatcagaatcatccaggttgacgcaaggatcttttggtaccttgcccttatttatgtggttttttaatgatgaaagtagaaacgcggcccacatcatgatcacctcttaaacaactggccagtgtgagagaatctcaaggttttttgtcattatccagcttgttttcgatactgtgggggagaaggtgcagatatgatcaccaggagatgcattctcatcagctctcccgcctgggaactttccccttcttagagtgccttctctccattcctgcctgtttaaatcctacagggcccaaacagacccacttggctgctatgagaccatgggtgaatcacagttcactcaataagccttttttttcttatctatacagtggggatattttgaaggttaaatgagtgatgtgtataaaatatgcactgtgactaacacatagaagtgccttttcctcttcttcctcctcgaccatcaacattatcattaaacatgagtgtttcactgattcttccctgattcctcctccaccacaaccaccaccaccaccacgaccatgctttccctgtggtgacctgttttctcatggcacctgttcctcagcacaatacctattccttcttcaagcccctttttgtctcctacctggaaggcatttttgtgggcctccttcagcctcccttgatcaatgccaagcctgtgtgcagagcaggtccttgctaagtatttggtggaaggaagccagggccttctatagccagcctgtaggatgaaacttctttttgacccaaaaatgggggagattgtcaatgtagattctcacttcagagggtcgattgcccaattcattgagaatcagttgaaggtaagagtccctgagtcctggctcctgtttgtctgacctgctttccctgctggactttacaaggaaggactgagacgtgttccttcctatctctcttctcttgaaacaatacctgcccagtagaagcacatcccagtctctctcaggggaaagcaatgactggggagtgaagacaggtggtctgggtgggtgggcagattctggctatcaggcagaggtctgtaaccttggaatgacatgcctcttctctgtgtcatagctccctctcactgtgaggttcacagcaagggctggagacaggcctgggttggaatcctgactcaactgttcttagctgtgatgttcctgaacaagctgctttccctctctgagtgactgatccttcgccataaagtggggatgctctaggcagccacatcccatggatacctgagaacttagtgagttatcatcttccatgtggctggcagagtgcattgttaggcaatggtggtggtgaagatgatggtgatggtgatggtggtgatatgataataacactaatggtgatgataatgatggtgataataatgatggtgatgataatgatggtgatgataacaatggtgatgatgatgatggagatcataatgataatgataataaaactgatggagatcacgctactgctgctgctgatgatgctgataacaatggatgatgaggagaagaaagagggtgatgatgataatgttgacaatgacaatgataaaaacggatgatgatgaaagggaagatgagggaaagcatggtcgtggtggtggtgatggtgtatagatacttcctgggtctaatcctcaggtttcttcagtatttccttaaagagttttgcatgtgtccatttccaaagcctctccctgtgagtgcatcaacctcatattttcacaccatgctgaattgtcatccctgcttgggaagcttgacattccattccatgaccttcataatctgtaagatttctatttctttgagctgtggtttctcctttagtatgtgtgctttattctactttctaaacctgtgcccgcaccaatcatttgccctgctgtgaagatagaaatggagcttccttctttcctctggtaattctgagatgtgtgagtttctgccctggggtttttagttttctcaaactgcagggggttaattagtttggttatttcacaatagcatttacagttttcttattaactgggaagatatccaaggactcctactcttcattggggtcttttgcaatgttttagtcacaaggatgggtggtaggacttgcagagaatccagtaataaggagagatcagagtcattgaaatcacctctagctatcctcaaaaagtcacggggctcagtttgtctttttggtttgaccaaggaaagaaatattagacaatgcatagcttcattgttcaactattcattttctacagattttgcttaaaaacacttaaaaagcacaagttatcaaggtactttaacttgggagattgggaaaaaattgaagagaaaaaaaaatcagggtatcaggatcttaaagccagcagaggtttttcctgcacctaaaaatctcaaaagggaacattctttcttggcaacaattgagtagttgtacataagatttgaccaggaatggaagtggaagagccaaagacgttgttttctcaccgtgaagactcgttctccagaagaatgggaatcggcgaatgaggccccgtctggacttggggacttgtctcttgctgcttctcctgcctagatatttgctccctccccaatctgcctggtcctctgacctggatttaactttaatttgttcatggagtcttccctgaccctccagactaagttgctccctgactgaccattactgtttatttgtaataataataccaagcacttgcccaatgcagagatttaaattagaattaaaaagagactttttaattatacttaatagttccccagaaagtgtttatttttaaaaatgttgaactatcctcagggcgaagataatattgtaaggctgagaatcttagagaaagttccatcattcattttatgtgtgtgtttctgctgtttctgaagcaaacacctagagatgctcttgaacatgcctccaaagagattacctgggaaatttattgcagtattcttcatcatggcaaaaacaaacaaaaagaaaccaaaatgtccaatgataggagaataaatatgtaaattgtgatatattcaagcactacaattctgtagtaagccacacatacacacgcacacaccccccatatattcatgttctcatggatgaatctctaacatattagtatgtaaaaattgcagaattattttgacaaaatggtattgtttatatgatgtttaaaaacatccccaaacactatattttatttttgtgttcatatggaatgaaagcatgaacatgaacagagaggacacatagaccaatttccaaatcatggttcccactgtggaggaagggactgggatggaagacaatgagcaaacaggtcttccactgatggtgatgatgatgatggtataatggtgatacttcgactagaatgtgtgacacttcctggagatctgaagcaaagatgatgaatgttctcacctgctaaatttaggtggagtgtgtgtgcgccttgcacatgtgcgtgcatgtgtgtgtgtgatcatttttgggacattcctgtgtgtttgaaatatttcatagttaaataaacagtgttggtcttgtgatgggcttgatgaagagatcgtacatacttttttttacatcagactctctcataatagatggaattattgagtccagataaaaatcagggtcatgcagaaagctgtgagagtgattaagggactttgtggtaggttatgaatgaaattgtgacgtgggcttcctgcctgctctttgcctttctccagacctgtgccatggacacctagatatttcctcatgctcagttccctgcaggcatcgctggggattggaagtcttagagggatccattatctgatggagaatttgagaggactcttccacgtgctggatcagagcaactattcagtgtgccctatagagcaactgacttagaatgttcgaagggaacagtcctctgaattagtcccacctctaaagagttatttaaatgctatctcattacctctgagttccttttatgaataaaaagggtattactgagtttaagatgatgagttaattaatgaagtataattcccagaaagcctctttgacataattttaaaacccagataggtataatcccatcatttaaaactttgaatgggagactggaaaataatattctgattgaaggatatagtaaccccaacaaggggactggagtgaagggaaggggagctagcaagggagagaaaatcaggcattgggagaaccaacaggtgacgaggaatgagactcaacctgaccctgagtcacagtgtacagtggagggcaccagggagatggtgttaggtgaacatatggatgagttgccaacagccagagcctctgacagggagccagctgccagcctgccgctgtccagcacataatgcagcctccatcgtgggtgaataaaccaagtccggtgtccatctgtcggagatattttgctaaaggggcttttccatgaggtggcaacttggactttccaaataggattctgtcatgatttgtgtaaagttaagcatcatgacataattgctggaccaaggacttagagtgggccataaaacaagtgtttgtttcttttatttatatgtttcttttttttttttcaagacagtgtcttgctgtgttgcccaggctggagtccagtggcatgatcacggctcactgcagcctccatcttctgggctcaagcaatcctcctgcttaagcctcctaaatagctgggaccacaggcacacacctccacgctcaactgattttttattttagagacgaggtctcactttgttgcccaggctgagatagtttcttagcccactgggttgatacttgattctgtttacctataaaatcctgaatattggggtgcaaataagtaaatctaagtttttgcccagtaagggctacattagccacaccttcatgagcacagtttcaaaatgtgaactaggtgttggcttaaatctgccaagcaacagaaagcaacatccccattgggcagatgcagcaggtagcagcagccttgccgtccgctacacgaggccgcttgggatgaaacccttcctcacctccttccctggagagacagtcacgatcctggccttcaccgtaagcttgcccttctcgctcagtgagataaagtgcaagcatgagataaacacatttcaagatgtgagtgctgttgcagtgtgttctgtgaattttcccactatttttaaggaagaaatcattttggttgaaggcatcactcttggttgtgatcagacagaaggggaataagtgcttagcacaaaatggggcacagagcttgacctgcagaaatggttgtcattgtcattactttcattaaactttggcttcagctatgtaaactcaggagagaaataaatgactccagtgacagggaaagcaattttatggcctaatattggccaaatctgggaattgtgaagtagccaaaaaagtagcattacctttgtttgaccaaactgtcagggcaagattacttggtttcatatacttttttttctttttttttttttttagatgaaatggtgttgagaaaggagtttgagatcatgatttttagcagccttgaaaactggtaaatgagaagattggagaataacattattccaaagcagaagctccttcttctcagatgataaacacctttgttgattaattgccatgtgctattaataggccgctgagtaattggaagtgattggcagaaggtctcatgagcccatctgtttgttgcatttttatgaccattttcagcacagggcatcttcagagtgcaatggagaagcttggagagtgacaggccagagaccaagtgggcgggacttggagacgcccatcctgccttgagaggacccaggacagtcatttcctaggggtttgcgtctccttttcttgcccccagtatcagtggagcatggaatgcggaggaagctggttgtttaatctgggattctggaactcacaaaactctttagaaatgcttaggccatagtgggtgaggctgttggcagcagtggcactgaggcagagctatggatgactgccagccgtgcatgtagggtctggggaaggggaggctttcgtctcctgggacagcaatgattgaaaagatgaggctgtatgacttagaccagcggtcctccacctttttggcaccacggacccgtttcatggaagacagtttttccacagatcaggggtagggaatggtctggggatgattcaagcgctttacatttattgtgtactttatttctcttattattgcattgtgatatataaagaaagaattacacaactcaccatgacgtacagtcagtgggagccctgagcttgttttcctgcaaccaaacagtcccatctggaggtgatgggagacagtgacagatcatcaggcattagattctcataaggagtgtgcaacctagatccctcacatgcacagttcacaatagggtttgagctcctatgagaatctaatgctgccactgatctgatgggaggtggagctcaggcgagaatgtgagccagggggagcagctgtaaatacagaggacgcttcgtgcactcacctgctgctcacctgcgatgcagccctgttcccaacaggccacagaccaggaccagtccagtcccgggggttggggaccccgactcagaccattcattctgccctggctgggaaggatgggctgcagtatcctgggcggggagatccacacagaccctcttctctggagatttccttgacttggaagtgattctctgttaatcatggagaccgtgagagcccagggggcagcagattaaatttgtgaataaaaaaatgctctgttttaaagttctgtgcggcgattatagccagacataaaggtggcatctcaaatgaacattagcctcttttaaaacaaaaacaaaaagtaacatgagcaactgaagcctcttgaatatgaatggatttgaaatcgcccacctacggcccaatgctctcaaatagacttttcccctgaccctcacagatgacctcactggttatgaagggacacactgatgagttcttaggctctggatgcctcatggtgtcatttcaaagctgctgctcagggtggaggatgctcattcgtgctgtggctggtgacacgcacatttgctgatcccccttttggaatatgttctgtttctgaagagtttttgcacttagcatgcgtaatgtggataagtagatgaatgtctgttctaggctggaaaataagactcaaaatgattgtgacttaaggtaaaagaaacttcaggttagcagtccttgccaaaaaatgattttcattcagattatatcaagggattggctgggagccaggaacatgaaaagaacaatatttaactagaattcttgaatagttatgtgagaaaatgtgtgtgtgcatgggtgtctgctgtgtatcagtgttggagcccaggcggctctcaagcaacgtttgtgatgtgtttaagaaacacatcagttttgtatatttgttttttaagatcctgctgcagcagtataaaactctcagtggttccagcggcagtcagcataggcaagttgtgcttgcggtaacaaatgaccccagggtctcagtggcttccaaaaaggctcatcctgctgtggtttgcatcatgtctccagtagtctgcagtcctggctgaagatgttaggtgctcttctagtaccatgtgactttgctttagagcacttttcccggctcatattagaaacagattagcatgattttaggctcgaagccccaagagggtatgggccattgtgtcaacctcatgtgcctgtcacagcaaagacagttggtcacatcggttgaaagaatggggcccacttaggctagacactacaggggccaagattaaaaaaaaaataaacactgaataactccctgagaaactgacttcacttggatttaaaggattgtacctacgtgaagaatgaagaggggtgctccaggaagaggaacaagtttgagcaaagacataggagcgtggtgaagctcagagtgcactgaggacttccaggaagttccacgtgagcggtcactgtggggccgagggaagcactaatgaggactggggaggagacgggttagggctggcctcgaagggcgagtggaatggtccatggggcctgcgggggttgatactgatgctttgttttttgtgtgtattcttacaccctttgatgggttcagctgtaaggctttgcttccactggggtcacacaagggggctgtacatggactgggccctcagtttgcatgttcatttgggaattactgcaggactggaatgacttggctggtctgtcaggcttttctgtttatttgtaattattcttctgtccacaatcaagaaaggatttgaagtaattttcaaaaatacagatataaattatggttgttaacatggtgagttcgagagaagcaacttattgaagttgtgtctgttcttttttcatgaatggcctcatgtatttttgttttctatatttgccattgttctcagtgatgagatagccaggggccaaaccgcctcttcactaagaggtaagccattgtgtttccctgttgctcattaatttagagagtttcatacatgctgccagttcctagattgatttttctttgtgatttttgactaaatccttgtttcccagtgtcttgtgttcaactttaatattttactttttgtgtgatgtctgtaatactaacacaagctcatagacaatggctcaaaataaggctttcctaagattaaaattgatcatatgaagccaccaagcaagggtcggaatcagcagaattatagaacacttcctcggctttgcgtcctttgaaacaaagtcaggttctgcgccggctattgacccgcagactcgagtctaggatgcacctgagtgcccaactgtgctgtgttctgagtgagatctctcaggtaaaaggtcaagtccaaggtagagctacttatgcgcaggtaatagtgggggcagaagtgatttttatctcgtttggattcctagctgtctctttcgatggacgatcaaattctaccaagagtcaacacatgctcctaatgagaaacctaatgggttccatgtgtgcatttcgggccaggcccagtgcgcctccctcactgctggcatgtttgcagttaccttcatctgtaaaagtcatatttccaccccagggaaatcgagagtgacaacacgccatgttcttctctactttctcacctggaatagttttaaaacctcagacaacaccaccccgcgatgatgagcatagtgaaactcaagccctctggtttttaaaagcagtgttcgttcttgtaattaattcgccatgtttcattgggaatataatgtttcattgaacattccgtatttcatttttactcagcttaatgtagtatggggtaaaagaagtccgtgaggacaaggtaaccatgcctttatggaatacccagggtggaaaatctgtaataacaacgtaaggagccctacctgggacactcctcacgatgccttcatcttattagacaaggaaatgttgattcactgcctgtcaggtttactttcccctctggcaacgaggaggggaacaggggaagagagagtttgtggtcacccctgcactgagatcctgaatggacagcaaggaagcggctgccaggagtgagtggtgttggggcttcatcctcggggagggctctttgtgcttccaggttacaaactagagaggtggacaacccctgccactggcaggaaagacatgggcaagaggagaggcgctctccaaggtatgcattccttagggtgccctgtcagctctgcgtcttctattcgatcaatgtttgctgagcacctgctgtggacctggtattttgtaagcattctggcagcacgttctcccttcctcatgcgggtggcactcccctgggagaggcagaacacacagggaagtacacagtgagcagaataaatgctcacgcgggacaaattaacccacgcgggataaatgctgcagggaaaccagcatcatgggctggaggctgaggggtgatgtgcagtcaggacagtctctctcagggtgaggtggtcattccattctgtcaggccctggggctgagtgtgtctggaagagggaacagcagaggcaggggactgagaccaggatagtcaggaggtcctagaggaaccacaagacggccccaggggccatgagtagaatcagtgcatggttggtgtggtcggagggaggcagggatcagccaggccagccatgggagccccagcaaggagcttgggctgcattcccacggccatgaggaggctttggagggtctgagcaggaacgtgctgttggatttgaggtttaaattaacccctctgctgaccgggcatggtggctcacgcctgtaatcccagcactttgggaggctgaggcaggcggatcacctgaggccaggagttcaacactagcctggccaacatggcgaaaccccatctctactaaaaatacaaaaattagctgggcgtggtggcacgtgcctgtagtcccagctactcagtaggctgaggcaggagaatcacttgaacccaggaagcggaggtttcagtgagctgagatcacaccactgcactccagcctgggtgacagagcgagactctgtcaaaaaaaaaaaaaaaattaacccctctgctgtggcatgagaatggattccgggggccagggtgcagcaggaagccaggctctgcgctatgcaggtgagaggcgacggtgagtgggccagggtgggaattagatcatattgactccacgtacgggtgccccccatctgtccctcatccccatcccacattcccaggcagttctgcttgctcccctgcagattggcacacatgtctcataaaccatctctcccattgtctaataacatggtttcatggctgtctcctccattagcccaagggttcttcaaggtcagtaccacgttttactaacttcatctgtagaacccagtgtagggcccgaactcccagcaggaacctacattacccctgactcatggactgcggttctcagaacctgacctctgtgggagaccaaagtcatagcctcgtgccccacatggccgtgaggccctgcccgcattcagaagacaggtgacagcccgtgccgctgcctggctaaatgcttgctccacacattttactagtggcggctgagtctgcgtgatggccaacgtggttttagaaatatacacctagattagatgaggcttctgtcttagatgattccaaatgttcttacttggattttgcttaaaggaaaaacaaaactatctacacatttccccctcttcatactttaccaaaaagaaagagaaaaaatgtaagaggatattgactcccacgatgcttcctgcggtgactaaatataaatatgtatgacagatcgcagaaggaatcattaatggcagctgtcagtgctatttaaaatgaattagacctttccagtttccctctagtgtgagcgctgagagacacataaggctgttctgattcatcgtggacctggaagtccattgttcagcttagtcgggagatgtatatgcttatcaggcaaaataagctggcgggggctggtgtttgcgaagcgccaactcgccttctttgtctcataacatttggcggggtgtgctttcctggttcggcacgggacattggtctcttcaacttcagctgatttgaattgggacccacaaaccaggtgggaagcatggcgtttgaaccgtgcctggaatatcagatgagtcctgtgtctgcaaagtctgatagtcagagggaataacaagtccttaaaatgaggaacagccctttccatggttaaagggaagagtggaaacccacgtgtgtattatcggggaagactttcttctgggaacaggtgtgcctgtaacatggtgacttcccactggtctgtttcgccccataatggtaagcattcctacatttggagagagtaggtatattagtctgttcttacactgctaataaagacatacctgagactgggtcatttataaaggaaagaggtttaatggactcgcagttccacatggcttggaaggtcttacattcatggtggaaggcaaaggaggagctaaggcacatcttacatggtggcaggcaaaagagcatgtgcaggggactcccctttatcaaatcatcagatcccatgagacttattcgctatcacgagaacagcacgggaaagacccacccccatgattcaattacctcccacggggtccctcccatgacacatgggaattatgggagctacaattcaagatgagatttggctggggacatagccagaccatatcaataggagacaagggaactgttgccagcggttccctccaccaagacctagagagactgaatgctgcccactttttctcatcttaaagctgagcttccagtgagagcttcacttctgttctctttaattttctttcacttccggtgtttaaataacccaggatcagtttatgtatcatgatatcttctttcaataatctggctgaatctctccaaatggctgggagtttatggccctgggcaggtggacgagtgggcagaagtgagaacaggacttcaggaagtataaaagctcttgtcacttccaaagggcctctttcttcctggctttgaaataaaccctctgatggccgccagtaactgtttctctctcaagtatggaagagaaagccatttggatttttggatgtaattgacacagggtctctaaaagttcttgtttgtttttcgtttgttttgggactacatttgaaagaagaggcatagagacccgcagcccctcctgtcctggctgcccagggcttctgggaataacagtggtggtgggagggccacattgtgccgcaattgttcctttatgtagttagcttcctgttttattttatgctgtgcggccccagcatccagggttttgtgcttggaagatcacacgtatgtcatgggacagagttcctgtctatatggaacatgggccacttctcaggaaccggcctgcagccccgatggacaggctgggtcatcaggaacagacagcggggaccctgcagggccacatatgctctacctgccccaacccaaggctgctccgtagccgtggagttggtggttctggggagaaaggtggctgcaacctgggattcagccccagctccgcagccgggtgtggcagctcctgtgctgggtaggattcagcacatctgggctgaagttttcatcttgagcaccagctaatgtttgatgtgaattgaatcatagggagaaaatgcccacttgaggcgtgagccagttaatttacaaagtcagtgagggaaaatcctgcaggtgcccgggaagggtgagcgcagagccaggatccagacgaggccgggagctggggtgctggctgatgtccccgttgctggatgctgctggatgtgtatggacctggggtatggcacagcaggcctcatcgggaggtctgtggagtgaaagctggggctccccacagctcccttccatgccccgtgaggcacgcccttgtgttataaagaatcacacagtccctcgtggagacggctctcaggggcagtcttgctgatccttctgcaaataagacccctctgaggccaaccatgtacgtggaaaggagcatgtgctcctaagttttccaggaggggaaaggaccaagttcatgtgggacccagctcagagcacagctcacccccggggcagggcagctcatgctaccattcgagcgagtggtggcctcagtgccagactcagcccagcgccaggaacccaggaatccctctcctcctgcccctgcccactgggacagtcatgtcaggaaggaactggacacatgtgggcgaggaggcagccgccctccagtgccacaaggccagcggaatacctctgaccttgcctctcccacccagcgtcaggcagacacctccccctcccccagtgctgcagaggccagcggaacacctctgaccttgcctctcccacccagcgtcaggcagacacctccccctcccccagtgctgcagaggccagcggaacacctctgaccttgcttctcccacccagcgtcaggcagacacctccccctcccccagtgctgcagaggccagcgggacacctctgaccttgcctctcccacccagcgtcaggcagacacctccccctcccccagtgctgcagaggccagcggaacacctctgaccttgcctctcccacccagcgtcaggcagacacctccccctcccccagtgctgcagaggccagcggaacacctctgaccttgcctctcccacccagcgtcaggcagacacctccccctcccccagtgctgcagaggccagcggaacacctctgaccttgcctctcccacccagggtcaggcaggccccccacagtgctgcagaggccagcgggacacctctgaccttgcctttcccacccagagtcaggcagatccctgccctctcccagtgccatgatgccagcaggacacctctgaccttgcctctcccacccagcatcaggcagaggcccccccccagtgctaactgcgccctcaagtggcctggggagaaaagttgtgttgtgagcggaaaattgccactcttatgggaaagatgatgctgtgttggaaactcaagcttcacttggaattatgattccatgagcatgtcgcatgctgccttttttttattttctaggaataattttgaaaggaaatattgtacacattgaagagtgactcaatacagagaccatcgctctaggctgagccggtctgaagcaggaaccaggcatgtgctgcatcctgaacgccaacaaacctgtgttcacggtggtgctggggtggcagctgtggtgggggcaatgccttgggtgtcacagccgccctccctccatccccgggcagcccgtgctcaaggcctgctgtcctccgtgctttcagatgctgggaaggtcaggtgatggccatttgcagggctctgcctccctggatcaaccaaccacagatcagaaatattcggaggaagaattgtgcctgtactgaacatggacagattttttcttgtcattcttccctacacaatacaatctaacaactgtgtacatagcatttacattgtattccataatataagtgatccagaggtgatttcaagtctatgcgagggggtgcctggattctacgcacacactgtgctatttcgtatcagggacttgggcgtctacagattttggcatgcacggtggtaggtcttggaaccagtctcccactgataccaagggacagctgtatactttggcataaatgacatttactagacatatagttctgcaacttacttttgttgtaatttttattttttgaggctacacagcaggtatgtatgtgtatgggggggacgtgagatgttttgatacaggcgtagaatgcaccgtaatcatatcagggcaatgggatgctgtcccctcaagcatttatcctttgtgtaacaaactaatccagttacactcctttagttatttttatttttatttatcttttttttttttgagacagtctcactctgtcgcccatgctggagtgcagtggcgcaatctcggctcactgcaacctccgcctcccaggttcaagcgattctgcagcctaagcctcgcgagtagctgggactatgggcaggcgccaccataccaggctaatttttgtatttttagtagagacggggtttcaccatgttggccaggctggtctcgaactcctggcctcaggtgatccacccacctcggcctcccaaagtgctgggattacgggtgtgagccaccgcacccggcctcctttagttatttttaagtgtgcaattagattattattgagtacagtcaccctgttgtgctaacaaatcctagctcttcttcattctttctaactttttctgtgctcactcaccgtctgcactctgccctcactacccttcccagcctctggccacctttcttctcctatctccatgagttcatttcatttttagcttctgtaaataagtgacaatgtgcaaagtttgtctttctgtcctgcaacttacttttaaaatttaatatatattgaaatacatgccgtgtcggaacaaagagttttacctcgtttaaaaaaaatccccgattaaaatttatttagtcatttttggtgacgttcgtttgttgccagcattgtccctcatgagagccagtgtttttccacaatgcagtgagcacgtctgaaaatgtggcaaacgtctttacattgctttagaaaggactgcactggcccccgtgcctgccagcggggtgtgagccgcctgtggggcagcctctccggtgcgcgggacgtccagcccttttcgtttctgacctggtggaaagaaaacaaagctttgtattttgttttgatttctatcgcctggttctgctggggtaggccgtttcgtgtttgagcctgtttgtatatttctccttggatggagatgttctctagggggcctggctgtttcttgttggtttgcaggcgttgttttcctagcctgccattcactccccccggtcacctgcactgcattttcttcctggccgtctgccgcttgctggttttctgctcttcggagttcttcatccggcagtgcagccaggagcccatcaccccgtgcacctgtgagacgctgcggacaaggagtgtgtcaatgtcccatccttgcggcgcacaggaggttccaggacccaggaagcctcaacattctctctgcctgtgtggcatgccggaccaaggggcccctggggctgagctcaggctctggggaccccacgggccccatctcctcccctcccctctcttagctccgcaggtttctgacccgccacaggggctctcgcctgcccgactctgtcctgcttcttctgctccagccacaggcttcgcttctggtgttggctctgctgtgtctcaggtttccacctgtggaaagcatatacatgatgaatgtgctacttcctcccctggaggcaaagcttagttggtgggaggggtctcaaggttgtgaatggggatctgggggtgcagaggtgccagggtctctggaaccatggggcagccgcgtgtccctgaagcagcctgtatctggactaatatttcctcttccattaaaattaatttagcaatctccagcgatgtgccaagccttcgcgcattgcataatgcctgcgactttggcctgtaaatttatttcaccaccgttatctaactctttaccttgtaagctgccttaatacactgagccttgcagaatataatcttcacagaaaaccgaatatattccacagcactgagagtggacatctctcagactggtcacttcttgtgcatcctggctttcaattcaggttaattccacttcctcctcttcctcctcctcctcatcctcctcctcttccccctcctcctcttcttcctcctcttccccctcctcctccccctcctcctcccctcctcctcctcccctgcttccccttttcctctggaaggtgatgtgagtgcagtacgatgattcaccccagttcaccttccactgggtgggaacagcgcttcatgccagagcctggaatgtgccccgttagaaacatccgcaaatgaaaattgctttttagcttggttggtttaatgaaatttatctttgagcataatggagaatgatgatttttcaccccagcagccctgctttgtgctgaaaggacttatcttctgtgtcagtgttgcaggactctgttttcctgcttgtaggtgtgaggaatcgataatttacagggatggggattattctgaagattctatggcagtggttttcaacgaggggtgattttgccctcaagggacattcgagaacgtctagggatgttgggtggtgctggcatcgtgtaggtggaggccagggtgccgccgaccgtcctacagtgcttaggacgccccccaccccccagaggcccaaatgtcccagcgccgaggtcgggcctggctgctctaaggagcggaaatgtctcccggcagcacgtgagtgggagagggcggttttccagacagtcctcctggatcccccaagaccctggagtcaaatcattctcctttgaattccaagacttacctcttcctggcaacgtgacctctctgaaccacggtttcctgacaagggctctcgagatggccatccccactttgctgggtccttatgaaaatggatccactgatgcacattgacagcttagcacaatccaggtggtggctgttgctgctgctgttgccgttgctgttgaaataaatcaaagatgataattgaggggagagagaagagacttccaggctttcccttgccccacatctgaggggctgtcctgacccctccctgtggctcagccccgctgcacctgctgggttccctgtatggcctggcagtgtggagcccacattgcttgccgtggctgaccggggcctgcccaccacattgctcggccaaggtttagccctggccttcacaggacctcgttggcttatcgtcccggggatgaccagcccagttttgatcctacactcctagtcacactgtcatgttgctggaacctgccaggggtgcaggagcggctggagagcatctgtgaggggagagcagggcacagggagcctctctctggctgccgacgcagcttactccgcacctaagagcatcctcttaattaggcatcaccggccacatttggaatggcgcattaacattttatgggccattttcccataaagaaaagcaaagccgatgtaattcttgctggctttggggttttggcttcacactcagcacatcagacaaaaccactgtgggaataaaattcctcaaatgtggctgcagtcattgagtagggagaaaaacgcaccgttaagtcctttagcaaagacccctaaatcctttcatttccaggcaataaacactgaacaaacctgccctggagaattgaagtccttgaaaaaagctctgagtcaagggggtgaccaagaaagcaaaacattcagaaaggctggagcaggaaccggactctcattccgcctctgctggcacaaaactgtggacttagaggaaaatgagcacgtggccagtcatccatggggatttaaatgtccttggttcttagcagtgacctcggcaggactgaaggggaaggtgattgggggtgaaggtacaggtcttcctctcgtggaaatttctggatccaagacaaacgtgaaagatgaagcaaaagaccacgtgcctcataaatgaaaaccaaagtccatcccaagctcccgcacagtccttgccaagggacggttatctcattgaacacaagctcagcctggttttctggtctgagagaaaaaaacagaggcagcttaagacatactctctgagaacactgaggagcagtagctggtagttaagacaaagggagaaaccatgtagacatgcacacctgtgtgtgtgtgtgcactgtgcacctgtctgccgcctgtctgtgcgtggatctctgtctctgctcatacatgcacctgcacacacatgcgtaccacacatgcgcactacagtcagaaggcctgagaagcctttcaggccaccaggctatgctctatgcttgaaaaatttcctgccttctccacagcctgttagggcatgagtgtttatggaataggaaggtggtggattgttctggaaatgatcaagttgtcaagagagcatgttatggggtttcggatgcataaagtttatcatgcacttggttaaagtttctttccagaagtcaaattttctttttagtattttcagcaaattgtctttcttcatctgggcatcccgtggaggtaggatgatgaggcagagcagcagcgtttctggagcattcactgggcatcaggcaatgtgccagtgcttttctatgaagtgcctcatctggaatgaccactgttcctattgaatggacgagggattatcttggaagagggttgagtcccttgcccaagaaactgcatctggaaggcaccgcagctggactgtaacctgctctgtgtcatcgcagcaccacatcctcctgccaagcagcaggccattccccggcggagaactgctgtttcccagagtgtccaggtaaacaagggtttaggcattacccagcccagctcagccagcagccctgagagtctttacacccagttgttgatgagtgaagccaagcggagaaacaccatgcctcttgcttgcttttatctcctcaccattaattgtctgactacattttcttcaagaggcaacaaagagtaaaagccgtgcagttgcttttctgtttagctggttgtaaatattcagccagaatttgactgacagtgcaatattatgctccccaaagcttgcaccgtatgtgaatattttaattaggattgtaacaagctattgagaaagtttgagctaaattggttcagctgtttttgcattagtgaagcatgaaaagaaatttttttcatctattagaaaatattctgtttttaaaaaattaagccaaagcaatggaacatcagccagttttggatacttagttaaaaagtcagcagattggatctaggtggggattatctggacagatttgaaagatgtgaaataaagttcaaagatgttattcacgtttagcctctttctctcggcagctgtttggaaggaagagatggatctcaaaggcagcccatgtgctaagagacgagggaatctgtagtgggcctgaactccgtggggtgttccagggttagggtcaaccatgctggtgaccttctccccctcactgagatgcggggtgccaggttaacatgtgcccccaacctccgcccaggctagaagcatggccatgccgccatcttgggaatacactgctaggaagttccttcctgtgttgagctgaaacctgcctcctgatttcgtcctcccacaccttggccctcgcttcttctctataatttgttagttatccagttttgctttgtttcagcctcgccttggacatcgtgtgcccctcccagcattgtctgagacatccggtaggcagggcagaggaggaccggctggtccacacccactgctcaccctgccgtgttgcagccacacacactgttgggaaatgctcaccctgccatgttgccgccacacacactgttgggaaacctctgggtttccccgattcctggaacctgcccttcatctctgtgaggtctcacgtgagctcttcactctgatggtgatgaactctttatgtttctcttcttaccaattcttcctggttccatatccccattcctacagggaccagacagcccccagggggaacctggccaccaggcagcccatgacctgctgtcagggatggacaagtggtcattgcatctcagtgtaggtccagtgttgctagagcttcacctcttccacaagaaaccagaaatctggaattaaatgcaaaatcccctattttcaaatagtggcagctaatccaagggttgtaaaaacacagtgccggcctcacaaagcagacccgtgtgccagccaggaccacatgcctgcaagtgatctctggccttgactctatgatccccaagggcaggaacaacgattctttgctttttattttttttccccagtcacccctacaacaccgacataattatctcttggtagttgttcctaagtgtatttggcagggcgtggcggggagaacgatggcgtttttgtgtgtcatgttcaagatttatgacaattgcacttggtctttggatgtgcagtagtgcgctccttccctgtcgctctgggaagacatgttaggactcataactgtgggttgtgctcattttcttctgcctggatatgggtactttgagagattcctgtgagcaaacccccgggacgtgcttcctgcacagaaacctcgaaacccctcctttgagctgttggtttaggatgaggagtgtgctgtctgccttcctctccctcagccgacccactgtgtgctgagtggggtcatggtcctgcctccttatttcccgaggcaccaagccttgtgccctgcacacagcacccacatcagtcaggctatgcccgcaggcctgacactgacctccacgaggggctcagggtccggcatggccatttctttgccatatccccaatgcctagtagagggcctggggcagagcgaacatttcataaatattggttgaatgaaagctgaataaactataagcttcccatcacctccctcctaattatttttgatgtctaaatgaggacaatttaaatatcagcattattctgctaattagtaaaacctaaaatccagtcccttgtaaagagatatccccgtattttacacagagagggtcaaatgcacggcccttccctggttttctattgcaaacctcacatttgtcttgcgaacacatttgcctgtttttgaaggctgggtgctggaagcttcaggcaacagtgatcccggccagggtctcagacagtaattcccacccagggaacagtcgctttaatgcgggggggaaggagaggagacctgcatgagccacggaaaccgttccctctacagggagccgtcatgcggcatgctcaccgtcagtttcagcccagggtgacgggggggtttactccgtgattcaccggcttttgggttccagagcacctcagatagaacaggggtctctaatcacagtgtgccacagcattcacgtccttatgcttgtcagagggtcaggttgggaagccggaatgtggagagagccaggcagagtttcccagaatcagccagcaaagacacatgcccgcatttcactccctggcagcctgagttcgttaactcatgggaagtttcggtgtcagtgacttctcatcttggctttcttttaataaataaacaatgaactcacacatcaccacagaaagcccctcttaaacctggcgaggtatttattctgtgtcgttggctcacttccctaggagtttgggggtggggggtggactacgaggtcactcatttgtcagctacgccgaccccgaattctgtggccatgcgcctgtgtgcgtgctctccaccttccctgtcccgggagaacctatggtgagaggccacagaggactgggcaccaggctcccctgggagcaccgctgtgaagctcccgacttccccagcacgcaggccgcctggacaggaggaggttccttcccaccacctccacgcggcaggtttgaagggcgtaggagtctgggctgagtctttgctgtgtcccacaaagtgatacatgaagcaggtgctccgtgtcccggcctggcaacccctcggtgcttgtctttggggacaaggacttagcatcactctcttctctcccacatcctccctttttcagctttagcaagaaaggcagagaggaagggagaaaacctaaaggctgcattctgcacaaactgctcccatccaagtctacagtgtgccctgatgaaagccaggctgtgggggagagaaaagagagagacagaggcttcaccccagcgagatggcagtttaaagagagaggcctcagaaagaaagtgtttattgagtgatcagccataataaactcagataaggcaacagatgaaacaaatcttcctggaaggaaagtgatcagagaacaggactttctggaaggaatagcagatcataaccagaagctgaaatctggagctcttggtgagatcctggttccaaaaagaagcaaactgccacacccagttttcacttctcattgaaccagaatttaaccagaatcactaaaatccaggggaggctgcctgtgagacagagtctgcatgttctcggcatcttggggaagggagatttgccacatcagctcgcaggtttgtcgggcagagccagagaaactgaactatgtcctgggtgtgcagatctgtgctgggcacagccagaagctgtcagacaatgaaaaagtgtgttccttacccttgaggatctttccagggtatgaaggataccaggtgagacgtgggagagacccaagaagtagaagaggtgcctattggggctggtgtgtgccctcggagcagggcagaagaacattggagagagccgcggtcaggatcccgggtttgtgtctcaggtatgagcctctgcttccatcagccatgcattcctggacagttggcatctgctggtagtagctgtgagccagatggaggacgctgtccagtgctgcagagatgagaccctcccgcctaggagcagggggccatgggagtcctgctctcagtacactgtgaagagcaaagtaacggagacacactcagaatgtcaccacccagtccagcctggggacatgtggcaatggagggaagtcagaagggccccagatgttccttacggttccactctgaacctgatattggaggccatgggtcatgggggtttctgaacttcacacaaaatggaaaagaaaactgtaaagaatctgtcaaaagcagtcagatgatcagaggcatacgaactcaattctagaaaggaggctttggtaactaagggctgtatacttgtgaaccgatagttttaaccccatccatcaaacaaaaagaagacggactggttattcccatttccacggagaggcaaacaaaaggaacagcatgaaaatgtagcaggaggagggtgggtgggaggcctgagagaacgcagagaatcacagtttccaaaaaggggatgcccttcaagttctgttattaggagaggagacaggagactcagggaaaagcaggcaagagacgaggctggcgtcatagagttgggaagggagcgacgtggagacgacttggctggggagcctggggtgactctcaggctgagactgagagggaaggagccctgagggttgccctttctggcaacatggagctcagggccctcccgttgctctggagaccctgctagggtttctgggatgggccctcctttgccaagagacttgcacgcatggatcttatgtgggtgggagtgggggaggatgaggaggtattatttcttagctttcatgatcacatgtgtcaaaaaagagaagggagaacttgtagaaatgggcagatgagagaagcacttggcaagttgatgagtatttgtaaatcactcccaggtgtgattttccaggggatggggagggggatacagctgcagtgatcaaaacagacaaccagacactttccttggacctctttcttctaatctgcagagcatctgtctactggctttggttccgaaaaggaagatgctcccattttaactttggtttccgacagtcgtgcgtggaggagcccggcctgactccttccttgaacagacatccgctgagcagcaggtgacggacccaacccaagctcagggtctaagaagggagagctggagcccgagtcaggaaagcggtgcaggcatgaagccagggcaatgaggctttcatcagtctgtgctcgggcatagggaggaggtgccgtggtgcggaacccggggtgcctgcccgcaagaagaggccagcccagcacatagctttctctcatgcccaagtactgttccagacccaggggatcagcttcctctcatgccccaggtactgttccaggcccaggggatcctgtgcacagcaagtaagccaggcatctgccatcccggagcccacactctccgagaggggaccagcaagtgtcttgcccagttggagcagctcggagagcagtgggtgctggtgaagaagatgcagagggctgcgcgtcccttagccagcatggtcggtgaagacctttgtgaataggagacatttgggctgagacctgagaagcaagaaagagccaggaaggcaatgatgaggaagaagaaaggtccaggtgggggcacagcaagtgcaaagcctggcagggggggatgtgcttgctgcatttggctgtgtgggccttggggaggggtttggggttttggggtgatggaagccacagagtattcagcagggaaggggagagcggagacgtggcctaggacagcgtagtggagagcggagacgtggcctaggacagcatagggcagggcagagatgtggcctaggacagcgtaggggagagcagagacgtggcctaggacagtgtagtggagagtggagacgtggcctaggacagcgtaggggagagcagagacatggcctaggacagtgtagtggagagcggagacgtggcctaggacagcgtaggggagagcggagacatggcctaggacagcgtagtggagagcagagacgtggcctaggacagtgtagtggaagtgaagggaagtggtgagattcagcgggtcaggatgggggagcaaaggggacttgaggtgaagacacatcacagtcctgatgacctccggggccatcagtgcccctggctggatggggtggggggcactccccgagacaggggcacctgagacagcattagggaaggaaggaggtggcgagaggatcatgcgttctgtgttgggccagaggagatcaaataactgccaagtacaagggtccagcaacgtgcatcattggtccaactgggtctgagtccaaagatgccattcctaacttttcaagaatgtgaacaggtggctttttacaaagctccgtgccacctgtgtcctgtgcccttgtgccgtgtcacatgtgaactgtgtgtcctggagagttgaaaagtggctctggactctggggttcccatttgtgaggacagtgagtttcttccagctctgacatctcctcattctggtgagctgaacctgctgcatccgtgccttagaattgtgtctgggttccaggacagctgccggcaggtttggaggctgagcactggaccgaggacctgatgcacatgtgtgagctggccattttctcatcctcccatccgtttgttctttaacttattcattcatttatccatttgctcaacaaatatttgctcaacaaatattgttgagcatctattatctgccaagtactgtgcagggtttgggggatataacggccaggaaaacagatagattccttgtccttatggagcgccagtcttttgagaggcataaaagaatctaaatatctctctctctctctctcacatacacacacacacaaacacacacacacacctatgacaaatgttataaagaagtcctacacacacacacctatgacaaatgttataaagaagtcctggactcaacagaagtgttaaataagggggatctggccaagtcaggcttcctgaggcagcaagagttaggctgatgccagggatgaagggcaggtgtcaaggaggagttagtgttcctgacgggggccacagtgcattcacacaggccagaaggtgagaaagttgccccttcgaggagagaatcaacgtggccagagctcagaggtagtcaagaaaggtcaaatcagggagtgaaagctaccaggtcagtgtttctctaggcaagtgaattggaagaagtagatatagaaatcgttacagatggtgcctgacttagaatgattcaacttaaattttcaacttcatgatgatgtgaaagtggtaacagtagaacccgtactatgatatttggtgagagaggtgtattaaaggcattttcagcttgggatattttcagtgtatgatgggattgttaggacacagtcccctcataagttgaggagcatctgaacttctaaattgcttgtggccagcatttccatgtgtcgtttagacactcaccatgcattaacccatagaccaatatgccatctgaagcaaggacaggaaaaggcctggcaccttgtccagcagatccccgattccagctgtgctctctctaccccagctcaggctcatccagtaggagctgaggatttaggagggttttctgatccagtggccaggcaccttgggaagtgacgtctcccagggaacccacatggaagctggtagagacacaagccgtgggggtggagccattgggaggactcttagatcaacttgccctggtctaggcaacaccgcagggctatccctgggggctcctcacaccccgagatcaggcccatgaatgttcacagcactgcatgagctcagggctccccatggccttggacttgctacctggagggctcctctgtagctgcttctgcagatggagatcagctgcctccacagggctcagcctgggcttgtctctgttccgcatcaggaggggggttccaagtgggaccttgaggtccacctagccaggtcacagctcaccctctccttggctctcagacttctacagacatcctggtgcacatgctgtccataaacatgtgcataaacatgcacaaagttgtgcttttttaaaccccagggtggagattctgacctctgtcttgcttctagtggatgaacattaaaagtagtgaaatagatctggtttcaaacccaagcgatgatgaggctgcctcagcagaagacgatgagaatttagaagagttgcaagatcccttgtggctttcacagtgcggcccccgacgagcagtggtgacagcacctgttggaaatgcagaccctcaggccctcttgcagagtggggacagcaggaactcgggtggggagcagcagctttgttttaaggagcccccaggggatcccaatgcctgttgaggtttaagaaccactgccctagaccacatgtaccaaacttggcccatgatggattccaagatatggaatggatctcctttgaaacaaacttttgtcctctagccatttacctgtagatttggagtctataatgcacctcagtgcccaactctactgtgtgcttggtaagatcatagcaagagtccaaggtaggtcatcatgggggcagaaatggtttccatgttgttttggttcctagctgtcttttttggtgaataatcaaattctaccaagagtcaacattttgctcctaatgagaaacctaagtaagtacaaagatgtcttcttcgtggggcttggcttctctttgtgtttgcagatgtctgttaggagcattcaagaacatgggcgtggctggtccatcacgggagggacggggtggaaacctgagtggctcatagtcaacaagggtcagacgggtgatgagtgctggggtatgaggagcaaaggggacaggaggcggcactcactatctccagaggacccagaaaggcttctggttggagctggggggtaatgagggtgtggagctgactcctgagggtgggctcagtgtgggggtcgagaatgactgtgagccaggatgcagctggcgagggaagctgggtctgaacctgccagggcctggtgcattggtgagagatgagctactcattgacgcagcagagtccagcacagcagagagaggctcagaacattagtggggctgcaatggggcgtgcctgcattccctttggagagacagtaaccaagctcactggggcatggcctttgagaacgctcagatcaacaatcaataggatttgcagatagtgtccccaccttgctcctgagatccaaggcaaactccacacaggtgagcaagattggattccacacaggctgggagtgttgagaatgccctttctaaagaggatgcatgtatgagctgggagataatttaatgatagtaaattacccaaatgcggaattagacaggcatgcagcaccagagcccaagttttggggatgtgataatggttttcaggcagctcatggcttccccagtggtggccggccagccgcagtcagaaggagggtaagtgtcctgtgggaagaggttgtctccactgaagcacagttctgctggagaaaggctggagtctttgcagtcctccagggctgaagactcaaccctaaagagatgttcctgagtctcactttgaattcattcctagcagttctctgcagtcctgggaggtcattctaagacgagatttctgtcttggcttagagtctggtcaaggtagaccctgtgactatttgggagatgaacccaagaaacataaggcgggaggctggggaggtgccaagaccagctcggtcggggagaccctaacccagcggtgctagaggaattaaagacacacacacagaaatatagaggtgtgaagtgggaaatcaggggtctcacagccttcagagctgacagccccgaacagagatttacccacgtatttattaacagcaagccagtcattagcattgtttctataggtactaaattaactaaaagtaccccttatgggaaacgaagggattggccgaattaaaggaatattgggctagttaactgcagcaggagcatgtccttaaggcacagatcgctcatgcaattgtttgtggcttaagaatgccttcaagtggttttccgccctgggtgggccaggtgttccttgccctcattctggtaaacccacaaccttccagcatgggcgttatggctgtcatgaacatgtctcagtgctgcagagattttgtttatggccagtttgggggccagtttatggccagattttggggggcttgttcccaacaggaagaaaaacggtaaaggaagaaaaccataaaaacagcatattaacggggtcatagccctggacaactggagcttgggccctttgcggaccctccagacaccacacagaacacattgcaggcaacgagacagcggggcccatcgaccccacccaccccattgctgacagagagccatgccgggactactcactcgggcagatccagtccacccaagccctgactgagcaaatgtgcaggtcctcagggaggagggcgtgtgccaaagcagccaccagagccgtcacttcccccaggccagggtgggacagggctccagagtgcctccgggggctccctgagatcacatttcctaacacacctgagagtgtcttcagttaaatgctcgctctgtgctaaacacattctggagctgaagcacagctgtaaacaaggctgacacaagagacagtcagtaaataagtggacgaatgagtaaacagcagagctcctgctaattataagtgaagccaattaaaaaaaaacaatggagaaagtaagaaagtgctcaaatagtggtgggaatgtgataaaagaaaaccacagaagccagcttgaaggggctcccactgacccaaccttgagcagcttgaaggggctcccactgacccaaccttgagcagcttgaaggggcttccactgacccaaccttgagcatcagaaacaatgacagttatagatcataacctccagaataaacaggagccccgagtccacactgaagtaaatagaggagaaaggaggaacagcactttcttgcggcaaaatgtcagctaatcaatgagaagggaatcatggaatgagaaaatcaccatttgacaagcatcataacaataattgattcaggtcagaagcctccgtagatgctgaaactactgagtggaagtttgaggacaagtacaggatgtatattgtacattgcctggaaatgcctttctccaggatctttttttttttttttttttttgagatggaatcttgctctgtcgcccaggctggagtgcagtggcatgctcttggctcactgcaacctctgcctcctgggttcaagcaattctccttcctcagcctcctgagtagctgggattacaggtgcccaccaccacaccaggctaacttttgtatttttagtagagatggggtttcaccatgttggtcaggctggtctcaaagtcctgacctcatgatccgcccgcctcggcctcccaaagtgctgggattacaggcgtgagccgctgcgcccggcctctccagactcttaatgattacaacgggaaaaaataaatagtaacttcccactggagaaatggcacgtacctccttgctgtgctctgagtgttttatgttcctgtgttgaaatccttacccccaaggtgggacatttgggaagtgatccatgagagtggagcctcaggaatgggatcggtgcacttagaaaagaggttccagagagaacctgcaccccatccgccaggtgaggacacagcagaaaggcaccgtctgtgaaccaggaagaagcctgcaccagacactgaatctgcaggcaccttgatcttggacttcccagcctccaaagcaatgaacaataaattgctgttgtttataagtcacccaaggaatggtaatttttttttttttgagacagagtcttactgtgtcacccaggctcactgcaacctccacctcctgggttcaagtgattctcctgccttagcctcccaagtagctgggattacaggcatgtgccaccatgccaggctaatttttgtatttttagtagagatggtgtttcaccatgttgcccaggctggtcttgaactcctggcctcaagtgatctgcctgccttggcctcccaaagtgctgggattacaggcgtgagccactgcagccggctaggatggtattttgttgtagcaacccaaaggtactaaaacaccccttaacgaagtaatcaaaattaatatcactggtaattgaacaaatcagtatcactgattgttgacacaatccactgagaaggacgcagcatcatttttgtgatatatccctgaaaatcccgaatctaatcatgagaaaacatcagagaaacccaaagtgagcaacattctgtagttcgtagcctactatcgtcaaaaatgccattttcatgaaatgtatagaccgattaaatccagattaaagaaaactcctgtcaaaacagcagttgaacccctggcccaggatagtcttttgttaaaagacattgttaggctgggcgcagtggtgcacgcctgtaatcccagcactttgggaggctgaggcgggcagatcatgagttcaggagttcgggaccagcctggccaacatagtgaaaccccctctctactaaaaatacaaaaattagccaggtgtggtggcatgcacctgtagtcccagctactcaggaggctgaggtgggagaattgcttgaacccgggtggtggaggttgcagtgagccaagaccataacattgccctccagcctgggtgacagagtgagactctgtctcaaaaaaaaaaaaaaaaaaaaaaaaaagaatgacatcgttggggcaataagcagaatctgggttgggtctgtagattagaagatggcattgcatcttgctatgtgtactgtgcatacgtaagaagatgcccatgtttttagaagaggcacatggaaggatgtattagagatgaacccagtggggttctcaaaatctacatgaaggaattacaggaattatttgtcctcttcatgcaactttctgtaaatctaaaattctattaaaataaaagttaaaaccaaccaaaaaaaaaaaagcaatgtcaaatggaaagggacagggctcgggggcacttcagacaggggatcacagaagacccctgcagaggcgccatttgagtcacgaaagaggagaaggtgcctggccacacaaagatcagagggaacagagtgaagcgcccccagtggggaggactttccagagtcctggggacacaaaggctggcatcctggggacagcagaggtaggcagcatggcccatagggccttgtagaccccgggataggagcggggttttattctggtgttccaggacctggtgggaaggtttctgagccatgcagggccccagcctggcctgccagggctgcatcctgtgtctactgctggtcagagaactgactggggttgggggaagggaggccctgcttttagccaggtggcagctgatggaggccttccccgagggtgggtggccctgggaagttgtgcgtagggaggagccaggtcaaggagggccctgttctttcacactgagctcctggctggccctgggggtggctgttgcctgtgaaggtagagtgctgggctggacctctgcatgccttcaaggagctcccggctctgggatccatgcagaggagagtggtacaggtgatgcacgggagaggagccaggtggtccctgggcatgcagggggctttgcaaccccgaccacggcctcctccctcagtctgtggcctcctccctctccccagtgccgctgagtgagtggtggtcattattcccaccaagtccaggggtttcctcctctatagacagggagtatcagttgcttctaaggattaaactggaaaaggattcaagccagcactgccaggaagggcttttgacatgcctgcattaagggaagacatatcattccagtgagcatttaaatactgattacatcttttgctttgtaaataactcaatggtaaatttttacaatattgtttttacagagactgtaatgaggaggcaatttttctcccctgtcacttggatattaagctttttaatgagagtacacaaatgactatataaaacttgggatggtgagagctgagttgggacttaatgcgaaattaaagttgtgcaggctccagctcactgatgaacgagccttctgtcattgtgaggagcggaatggtgccggctctttgtcctttctccctccctttcccccgcgccgtttgtcctcccgaggagcctcagcgctctgggcaggggtcgcttggagaggcttcctgggaacggggcgggagcgcgcagcctgggggattttttatttgggagcatgcctactttttaattggccttggtgttaatgaatggattcgttctgtttggagcgagcaggctgggcactggagcgtgtaatctgattgcagccgggagctcggagccctgcagaaggctctagagtggcagggactggtttggccctggactgtgcagtgctggcggtgatggggccagaagggtgggaagtggggagaggtgggcacctgcaggatggaggccatcagggccatttgccctcttgcagcgtcccccaggcagacccccttcgggctctgaggccggggttggatgaaggggacccttcctggggcagcccttggtgtccagtggacattgaatacctcaatacacacgacttgtccccgcaggtaagaagtgtcagacgctgcggacgtgttttcaccctgccagctctcagtgccatcgggaaaagccttcaaccagccgtcgtataggtggactgtctggttattccccagacagctcgtttttcttcctgtggcttctcagcctttcagctcattctgcatttgaacaatcccttccccaagaccaccgggcaggcctctgctgcgggccccgagcccctaccaaggcctgtgtgtgttaccagcttcgtggctgggtcccggcatctggaggacagaggccatggggctcccgtggagacctcatcacgcacagagcagccctgggctgggccgcatggaaggcgaaggctcgagtccagaacgggcaagagtgtgctggtgcacatcttgaaggcagattttgaatctgaaatcttttcctgcggtgatgtaaacccccaccctcaccatccgtccctcgcccctggccaagtgtttgtgactgtcatttgggctccttgtaccaagcccagtcttgtggagatgacccagagtaatgtttaatgaggtcacgggcaggccgcttgtgtttgtaaacacgtgcacattccaggcttacagggctctgaatttgcttctgtgtttggattccatacttttgctccacatttgtcacccaggtctctccctcctgggatagagagaagccgttctctgccgggtgttttggcccctaagtgaagcgtgtgacctgtgtggatgccccatctacccctgaaagccaaactccatgtcttcctgatggcccagccgttgtctgtggcttggctcctgtggggaagtcacacagaggtgacctggcccatgggtctgtcccatgcaggcacagaggcagccgcaatgggaccaggcacccagccctcctgcccagtgtttacatcagaaggaaacagcgtgctcacgtgtctacccgcacacgcttcgcctccttctccgtgcagcaccgccctgctgagcagctgtactgtggactcttctgcctgcaggtccccatggctctatttgcagacccacctcaggggcctgacacagactaagcagcacagattcatatttcagtaaagggtgacatccaggaaaagctggagccctgccggacctctggattgctcctgggtcaccccaaagctgtggtggacttgggtggctgcaaagatcttggtccccctggcatggctccagttctcggttaccctgacgtcccctgagatccagacctggagccaaccctcccccaacccccacccacgtgccagccgggtctcagttttgccacagatgaggagcaaagcctcccaggtttctgcccacataggagggatggccgactcctagtagcaggacacacttaccaagctagactatttctttccacacctacagggaaggctaaaaagcatcctggaggtttccgggaatgagattcaaagggcggaggcctcagcagcaggcgtggacacgcaaccccagccccgtgccctccgcgtccttgcatgcatttcacacgatacttcagatttttttttcatttagatgttaacgcttttataaaaagtacttttcataaaaatcctgattcctggctaattttctagacagttggaggatttggcttccagagcccacattgctgcaatgccccatggctggcttagggcagcagctgtcccttaactgggcacgtcctctgtgtggccgacactcccgcccccgtctcaacacccaggtgtgtgtcctgccggccccgtagcctggaacaacaccctgtgtcctgtgccctgggccgtcagcactaggcagctcctctcggtgagggctgagggcattggggcccagcataggccccagctcaggggagagccagggatcccgagcaggagggcttgcacccgttgaatgaaatgggctatgccctttagccacttgttctgcattgttggaagctgattcaaagacccttttattgttctaaaaacagcaatgatattctttgttctttgaagataatgtgctggatgttctcccattacatttctcataatgaatgtcgtcctggggctcgcaggaccatttggacttaatggagaaaaagcagcagacaaagctgtagcaattccttgctgcatccaccctcccagcaaaacgggattagaacctggggaatatgcgttccgatgaccagacttacacctgaattgccaggtgaccttgggctgattgtgtgggatatttggggctgttttgtccactgaggaatcacaataatgtgccttcccctctgggtgccatgcgggttggctgttgaatgggttggaaagtgatttgaacacatcgagggcaacataaatgctaagtgtgatttctaaaatgcacagcagcttgaagaagtagacatatgtgggtgactgtataaactctgaggactcagtcacattaaacatatggatacacctgttctcttcagaaagtgatggggatggggcaggtgtggaactcgtggggcagtggtgttctctagaggtggggtgtggctggcagtgcgcacggcgggtgtggagggtttagcgatacagagcccgcggggctcctgcgtgatggtgacagagcatggaccccaagtttttaaacatctatcaagcactgtcacagagctggcactgagcttggggcttgtaggttggcagtagcacctataggttggcactagctccctgaggagctcgctgtctgaaaggggagaagcatgtggaaaagttgagttctgtgcagcgtgacgtggaggagatgcgtgaagctggaccaggggccgtccccatgcacaggactcagggaaggcttcgcagagaaggtgatgactggaggaaaggtgcagtttgagggtgactagggcaccccatcttggcagcgtgacatgtcgtggcatcccctgggagttacctgggagtcctgagagggtctgggaggggcaactctgcttgcagactgcccgatctcgggtcctggtgctccactcactttccctgtggcctcgggcaagttatttaaggtacctggacaacagtttcctcagctgtgagatgggatgacggtagtaccgatctcacacagttgtcacaggtgtaaaccaaaaataaagttctaagcaccccccaaccatctgaacggactctctcctaggccagggctctctagaatttaacctgaaagatcggtttgggccttgagtggagttcggacatgcctccagggctctctagaatttaacctgaaagatcagttcaggccatgatgggaagtgggggtccgacatgcctcatgatacctctctggcattaacatcaacacagtcctcaagtctgataagaaacagttgcgacctatttcttgggaagcgtgccgcctggaggctgcatctgcattatacagcttcggtctccacgacctcctattgcaacccagacattcctttctattgataactcttccaaccaattgccagttagaaaatgtttaaatctacctataacccggaagcacttgaatccttcaagtcatgccacatttctggaccaaactaatgtctttcttcaaggtatttgattgtagcctcatgtctccctaaaacctataaaaccaagctgcaccccaaccacatgtttgggcacatgttctcatgatctcctgagggctgtgtcacaggccagggtcactcatatttggctcagaaatctcttcagatattttacagagtttgactctttttgtcaacataggagtgatgcttagaaaagttcatggtacctactaagtgcttggtaatgttgggtgatggtagcagtgctgatggaggtgatggtggtgacagtggggaggtggtgatgaatgtggtggccatgctgattgtgatggttggattgtggtgatcatggtgatcatggtggaggtgttggtgatggtgctggtggtggtcttggtggtggtagtcatagcactggtagtgatggtgtggtttattgatggcagtgtgattgtcttggtggtggtgatgatggtgtggtttgttgatggtagtgtgatggtcttggtggtggtgatgatggtggcgctggtggtggtcatagcactggtggtggtcatagcactggtggtgatggtatggtttgttgatggtagtgtgatgatcttggtggtggtgatggtgtggtttgttgatggtagtgtgatggtcttggtggtggtgatggtgtagtttgttgatggtagtgtgatggtcttggtggtggtgatgatggtggtgctggtggtggtcatagcactggtggtgatgctatggtttgttgatggtagtgtgatggtcttggtggtggtgatggtgtggtttgttgatggtagtgtgatgctcttggtgctggtggtggtgatggtgtggtttgttgatggtagtgtgatggtcttggtgctggtgatgatggtggtgctggtggtggtcatagcactggtggtgatggtatggtttgttgatggtagtgtgatggtcttggtggtggtgatactgtggtttgtggatggtagtgtgatggtcttggtggtgatggtgtggtttgttgatggtagtgtgatggtcttggtgctggtggtgatggtggagtggtggtggtgatgaaggtggtactggtggcaaatgtgctcaagatggtgatggtgttgctgatgttggtgattgtgtgggtgtggtggtggtgccaatgccagtggtggcatttttgcattgatagtggtagtagtggtggtgatgtgctttgaaaggagcataggacccctgagaccggccacaaaagtgcctggaattctgctgtgtgggatgtgagtgttgttgggaaagatcccaggggaaggagggcaagaggagccggagccatcttcttggagaaagccaggctctggccaggcctgggaagggagacagcaagacagtttcctcaagttagagaaatggaaatggcacagaagtggggcaggggaacctgcagcagggactgagagggacatggtgaggaggctgaggtggaggcgtgggcttgggacattctgatgctggaagggctcttactccaggcggagttcaggtcacccatggggaaaggctagtctggggccatgatgcatcttactgagcattctcccccatggcatatggttggagtggttccctcctgtggatccttctgtgtggctgctcccgtttttcccatctgtctcagcacagacccccaggcaagccctggaaggtgggtgctcacattcccatgctacaggtgagggacaaagttcagagacacaggtgaatggccggtggccaagatcattggcaccgggaggcactacctacaccacctctcctctctagcacttccctgtggcaaatgccctgatctgacagccttcctaggtggttctgacactgatgggcacagttcctgagtcaaaagcctgctttgcaattctttggggccaactctttcatcccaaccagtgagcgctagttaggcaagctggaaagctgtaggatgatcaaaatatgaacgtgcacccaccaccaacacgtgagggcggctgctgtccttcaagtctgcgttgccaaggtaactggggatttggaagggacagccaagtgacatattctgcaagcagggctcggcaattattgaagagttggcggctcaatctaaaacggaggagccttgaagtttgcagaagtggaatagaggcatggggggctctggtgaggggcagtggccgtgttgcactttgtcacagcatcatttaggtgacacagcccgggactcctgggccctgacgaatccaaagggtccccattccatgtctaagtgcccatcggacggttgagttgtgtggtccagggctctgccggccccgcctcctggttgccccatttccttcatcctctctccacctccctggtgcctttcctgagtgtaaaaccctccagcaccaagacatccccatgtgcacttgtataaagaggaggctgtggttacggtgaccttcaaatgtccttgttaaatgaaacaaaaccattgcatggtgcttttctgtagtcaacgagtcgctttagctttcaaacaactgtagtgtctttaactttatctgaagaacgtgaaccagatccccagaaagaacatccctttcaaaaccagaagtcttaggctgttaatgtgccataaccactggctccaagcaattcttcagtgctgtgtaaagggtacattccatctgttccccatctggactccttaggtcggtccactggcctgtgccttgtccttagaaggctggaggcctgtcctctgtagcagaagggagatcaatgcagccctgccaattagcggggaattagctcacacatcccttcatgtgccgtgatgttgactcacgtgatctggataaatgacttaggaaaaatggttctaaagatttcactgggaggctgggtgtggtggctcacacctgtaattccaacactttgagaggccgaggtgggcgatcgcttgagcccaggacttcaagaccagcctagacaacatggcaagacccccatctctctaaaaaatacaaatataagctgggcatggtggtgcacgcctgtagtcccagctactcagcaggctgaggtgggagggctgcttgagcccacgaggttgagtctgcagtgagccatgatcattgccactgcacggcagccagagggagaaagcaaaactctctgttaaaagaaaaaaaaatttattgggatatagttttcttccctttaaaactttgaaattatagtgtgtgaggttcctggggctgctgtggtcaccaattagcacaaggtgggtggcttagaacaacagaaatgtgttgtctcacagttctggaaatctgaaatctaaaatcaaggtgtgggcaggaccatgcttgctccctccctgggtttctccagctcctgctggctccggctttccttggcttgtgaccacatcactctagtctctgtctctgtcttcccgcggccttctcctctcatctgtgtgtccctcactttgtgtctttcataggaacacctgtcattgggtttagggcccaatcagataatccagaatgatgtctttatctcaaaattactaatcacatctgcctgtaaataccatttctccaagtaaaatgacatcataggttctagggattgacaaggatgtattttggccatcagacaactcattccatgtagaaggatgctttagcataatttttagaactttttttggaagtatttctagattcacagggaaattgcaaagatagcccagaaaggtcccttcacttgatgtcccaaaggtagccttcaattaactgtaggatgatgtcatcacaaccaagacattgacattagtccagtccacagatgttaagcatccattttttactgagggctcagctgtaagtcagagagaccctcccttcctcgctgtttgactttaagcaagtttgcaatcattctgagcccaaggtttctgttttccacctatgcaaaagggagcgtgagaatgccgggtagggggttgggaaaattaaatgagattgtatgaatgaaactgggcacgtggcctgcctgacaagtggtaagtgtaattcctcttaacagactaacaccagggtgtgaaaacataatccattccaagatctgctcctcggaagggtctgaggatgagatacagaggatgcacgtggttttggagtgagtgccttggctgtggggtgctgggtctcagtgaggtcttgggaatgctctgctctcacggtcactaacagggcagcagtggcatggagtccccttaattgacagacaaccacgtagagtcatcctgtacttctcgctgtaaataccaagcaggatggaatagttagagccgtgactttcacagttattgaagttaatccaacatccgaatctgtgtagggaagtcctgaaggtcattaagaaaattcagaacctcatcttcccaagccagcggctgcagggaggtggcctgtggggcttttggtctttaaatcctctgcctcacccctattgtccagtataaccatcacactttctgaaatccacaaatggaggggagggaggttactgaaatgcttcatttaaatgcactgattcgacaaagaatttttctaaggagcagtagaaaaatggccaggacattctttcctgttcccacggtttaaccaactctacccaaggctcctgtgctcaactgttctttgtttcaattcccgctgcaagttttagaggtgaagtgtcaactccagggatattaaacaaaaataaaaatgactcaaaaataggtagcattgcttagagcagagacaaatcattcaaagaaaatatcacactatcactggcctttgtttaaagtgaagagttaggcagataaggattgtgtagataattttgttgcagactttttttacaaagactaatttgacattgtcctgggaagctgtccctttgaatattcaacaaaagcaaggatgcatagggagagatggtgttgagcatattattttgcataatttatgctcagtgacagccactgcctgcttcacttcatcagacatttagggggagactgctcgatgcttcaaatctcattaagctatttattcattgtaatgaatgattttaatgtactgcattaaggttatgccacactgaactgttaaaaaaatccatcttactatacacattttaatgtttgcagctaaattaatacctttatgactgcctcaatggttgaatggacaccatttgcagatgaatcacactctacactcatccccgttttacccagttctgggccatggcctgatagagttgtgatcatctctgtgtatccatatccgtggacagatagatgagtgatcgggtttgtgtgaactctgataattcacaggctttcccttccacggcgctcccaccaacaacaccatcctacaaacccccctgccccctcccacctgttttcacccctccctcgatccatcaagatgtcagcaagttgcgatgatgagaagataatatctttcgggaggatgaaaggcagttctaataaaaagctgtcattcacaaactcagacccactgtcacacgatatgcattttaaagaccatatgaactgttaaatggctcaatatggcagcccgcatggttgttacaacttggagatctttcatgatgctgaaagagggtgtgggacttattgcagcttcggcaaatgaaaggtttgaggttctacaaagaaatatgtcatctgtgttctgttgcatccgaagtatttctcctgcctctgctcaagatgtcatcagaaatactcacccttagcaggggaagatgtgggaaaatttagatgacataaaaatactggagtatcatcctttataatctagcaaatatttgaaaactacaagctacgcagcgtgacatagtccctgtctgaattcggcagatggaaattcagagtgttattttgcaagggaaggttatctggtcataggatggcacattttaaatttgggagaaggaagagagaccagctcccctagcctgtatggagtagtgatctcgaatgaggctcggggtgcctgcgctccttaatgcgtcttccaaagaagctgtcaagtgtcctgccttgaaaggtcaccaggacgtttgtgattgactcttgataggagttgctgcttatttctgtagatgatatcaccagggcccaatcagggactcaagttctgaaatgtaaggaagaataagttctttgggagaaagtaagtgcagaaaatcatagacagctgttttgggcttgtcttagcctgtgcggaaataattagttcattgcacataacctagcagtttacgattaacaaaaacatccacttagcaaggagattttttttcagtttttgaagaggataaatgaaccaaggaaagaacatgtgaccctttccccatccctgcgtgccttctcccttctcaggatgccttgaagctcaacaaaaactgtacacgctatgatggaacgctgctctaaagccatagggcagtccgcagaatgtccccccttggaagatttgagccaccagttaacccccccacctaaggaatatcaattactcactttcccaccccaatttggcctttgcataatctactaccagagaaacactttgatcacatgacacctttcagaaaactatttaaaaagataactgttggccaggtgtagtggctcacacctgtaatcctagcactttgagaagctgggcgggtggatcacctgagctcaggagttcgaggccagcctggccaacatggtgaaaccccatctctactaaaaatacaaaagattagccaggcatggtggcaggcacctgtaatcccagctacttgggaggctgaggcaggagaattgtttgaacctgggaggcagaagttgcagtgagctgagaccatgccactgcactccagcctggaaaacaagaaaaaaactccatctcaaaaataaaaataaaaataattaaaataaaaagatcactgttctgagcagaaatgtttaatggaaaggatacctgatacctgtggcatcatgtttcatttaactagaggcttaaacgtaaaaataagaaatgagaactataaacaaagcttacttgatgcctattgactgcctggccgcctaatggaatgctcaaatgcagcagctctaacttattatggaaaggtaggtggtgtgaggtagggatcgtttcttcatcaggatgaagagcagagcgagagagccttatgccaagaggaaaggtgggtgaaacacacatggtgaacatgcacatggaagaccctggcatgggggacccctgggagtggacctcccatgagcaggtgttcctggtgtctctgccatgggccctcctgaaaaggcagagtaagtgacaccttctattggcttcccagggctgttgtgacaaattactacaaactaggggacttaaaaccacagggacttatcttttcacagttctggagaccagaagtctgaaatgcaggtgcgagcagggccatgttccccctgaagcttccggggaggcccctgcctcacgtcttccagccttgggcggccatgtcattccaggctttgcctctgtcttcatgtggttctcctcgggtgcacctccatggccttctcccttcttgagaggtcacctatcatcagaaatactcagtgccagggagttagagcccaccctaagtccagaatgatctcatcccaggatccttaatgtcattacatctgcaaagacccatttttccaaataagctcacatttccaggtaactagggttaggatatagacatgtttttttgcagaggggaggacacaagtcaatcggtacacagacaaaaaaaaccaatcactgtgtatcatggtgggggagtgtattagtcacagttctctagagggacagaactaatggaatatatataattcatatatatataatatatatatgaatatatatatgaatatattatatatagaatatatatgaatatattatatatatgaatatatatgaatatattatatatatgaatatatttatgaatatatatgaatatatttatatatgaatatatatgaatatattatatatatgaatatatatgattatatatgaatatatgtgatatatatgaatatatgatatatatgaatatatgtgatatatatgaatatatgtgatatatatgaatatatgtgatatatatgaatatatatggatatatatgaatatatatggatatatatgaatatatgatatatatgaatatatatgatatatatgatatatatcatatatgaatatatattcatatatatgaagatatatatgaatatatatgatatatatgaaatatattatatatgatatatatgaatatgtatgaatatatatgaatatatatgaatatatatgatatatgatatatgatatatatgaatatatatgaatatatgatatatatgatatatatgaatatatgatatatatcatatatgaatatgtatgaatgtatatattatatatgatatatatgaatgtatatgatatatgatatatatgaatgtatatgatatatgatatataaatatatgatatatatgaagatatatgcatatatatgaagatatatatgcatatatatgaagatatatatgcatatatatgaagatatatatgcgtatatatgaagatatatatgcgtatatatgaagatatatatgcgtatatatgaagatatatgaatatgtatgagtttattaagtattaactcacacaatcacgaggtcccacaataggccatctgcaggctgagaagcaaggagagccagttcgagttccaaaactgaagcacctggagtctgatgtttgagagcaggaagcattcagcacgggagaaagatgaaggctgagaggctaggccagtctctctcttcacatttttctgcctgcttatattttagctgtgctggcagctgattaaatggtgcccacccagactgagggtgggtctgcctttcccagcccattgactcaaatgttaatctcctttggtaacaccctcacagacatacccaggatcagtactttgtatccttcaatccaactaggttgacacccagtattaaccatcacaggtggggatattgggaatcacaccaggaggaaccatgagtgtagagacagggtctccccacagagcatggaacccaggtcagccccaactgagactagcaccaatgggggtgctaaagatctggcctcttactcaggccctggcaggatagagaaggccgtgcttccacagcgtggtctggcatttactgtgctgctgtccatctggaagctggtgacctggatgtgtggtttgtcctgcaaaccagtcttttctgaacatctgccccaatgtctcagcacttctcatcccaccctctgcgtcttctacccttttctttctaatcccttagtctctctctaccacattctaaacagtttcttctgacttgccttccaattcaccaattctctcatcagcaatgtcagctcagctactaatcctacccattaagttttaaattataaattctctatttttcacttctgggggttctctttcattaattttcagcttctttttttatacttttctgttctttgaagttattttctaggtcattaaacaaatctctttaaacataataagcataggtatttcagactctaagtctgatccctctcagtcctgatgtttgcagttctgattctattgtctgaggtttctacttgttctagctcatagtgtaatcatatctaactctgagctactcgtttgccatgggatatcactggtgagaatcttcctacgatgaggatgtgtgtctccagggaggttttgcattagcgattgccaagccctaggggcgttttcagtttggaactgctttaaactgagtttgaacttggggttctaccggcaccaactaggtgtggtgaatgtggcctccatcctctccgaacagtactcctaccctctgctccactgagccaccttccctaaagcctctggaagtggcaggaggagggactagggtttaaccttatacggaggatgtgcactttgaagtggcagcgttctgcgatctgtctcctacaagaccatccacctggatgggccccaggctttgtcttctttccccacaaccaaccccttcccttcccttccaagaccatgagatgaacgctcagatcaggaggttggcaaatcccctggacaagaacagctgaattcattgtgccactgacgaaatccccgccgccccccgcccccttggattgtggtctcaagaattcttgaacgcttcctgtctgttcagctcatcttagccttaatgcagcatgtccagctgtccctgcctgcgttggttcaaatttctgccctaccatattgccaaacgcgtgactagcctcctctgcagggactggttcctgctctcctgcctcctctcccgttatcttctgttgctgtccacgctgtatccaggctggctgtagcttctccacacgccaggttcccaggctcaggatcgtcacagatgccttttccaccaacgggaatcaccatcttctcttcgtgggagaagccgtactcccctcctgcccacctttaaactttaacgtaggtgtcatttactcaaagagcccccgagtgcccaggcctcctgttcaccttgatctctgcacttggcatttgctatgtagattgcagctgcggttcatgcatcatgtgggtaaggatttaatgcctggcaccagactggagctgagctgcaggaggtcaggagccacagttgtcctagcgcctggggacgctcatggatgtttctcccgtggctctgtgctcagctatgcagctgtcggccaggagcagaccccctaccttgaagcctgagctgtctgagtagtgacaagggtgtgtaggggtgaagttgacccctgtctcattgttcgcctttcctggaagaatagaccacgtaccactgctgttcgttgttggggaggtcttcagcccctgtgggtgctgagccacagtcgtgctgtgcctggcctcacagctcctggaaggaacaaaacctctcggtctcctccaaaggcatggcctccctgatgctgacagtgctgcccaggatgacacccacccatccatgacaccctcctccagacaggagacattggataagtggattctcacctcccagccacctctctctctaggtcaacttcttactcaccagtggttccactctgccttcccccagccttccctgcggaagccctggcatgcactgaacccgtactgtaagctctttccttctggtggaatgatgcggggggcctggccttgaggtctttgatgggaagatggaggcggtttggcaccatgaggttagagaggctgggttacctggctctgcccttcctagagaactgcacatggattcttttatctctgaaatgtgttatgttcccctgggggtgacggtgtcttctcatcggattgtttcagggttaagcaggagagtattgccaagcactcatcactgtgcctagcacaccgtcaggtaaaccattgctgtcctcgatattttgtgccttcaggaaacagagagaggtgaccctgcaggttccaaaggtgcttcctgagagaggtcaaagttggacctgaagggtgaggcagatgttccccggagcccggggggaggaggcgtcaggaccggccccaagaccacactccgggtcaatacatgtagatatgtaagctgcccatgggaggaactcccgcgagttctgttaccaattttccacgtctctgagatgagtttacattactgggttggattctttttatattttgcaattttgtttaaaaattataaaaataaaatatattcacaattaaaagaaaggaaaatcctgcagttcaggatgctggaaggtaaaagatactcacctcttctctaacccccctaatatgacacacacacacacagacacacacacacaaacccacacacagatccatatatacatgcagacagccacacaaacacacagaggcacacatacagccacacaaacacaaacacacagccacacaaacatacacatacatatacacacagccacacaaacacacacagaggcacacatacagctgcacaaacacaaacacacagccacacaaacatacacatacatatacacagctacacaaacacacagagacacacagccacacaaacagagaaacacacagccacacaaatatatacatacatatacacacacagccacacaaatatacacagaggcacacatatagccacacaaacagaaacacacagccacacaaacatacacacagacacatacagagacatagacacacgcacatttggccacacaaacacacacagacaaaaagatacacacagacacacaaacacatcccgatgtcctgtttgagtctgtgctcaggtacgtaattaatcatcacagtggctcgtggctcaatcttgtcattggtccacgcaagcctctattttataaatgtgtttttaatcactccacggtgaagcttttccgcagtgagagcaccagacaagcccgcaccggcccgtggccctgccccttccttcccactccttcccggccccacccccctctggccccgccccaggtctccactgccgcccagatccactgtctctgttccctgctttgctttctaatgcagtttcatcacatctgtgtgtttagctaaaaggtatctctatttttggtttgggttgtttaaattgtaataaatgggtgtctataatttgggggcacttaacagttttgcattcaatgttgataagatttataaagcaaacattttggccaccatatggtataccactgtttgaactccacagtttaccatcctgcagggtggagacggcagggctggctgtttctttgcagttagaatgtgcgtggtccacatttctgcaggctcacaggcaagggctgtgcagctgtcggccgggagcagagccctgccttgaagcttgagctgtcggagtggtggtgggtgggggtaggggggtgtggggttgacccccgtctcacttttcgcctttcctggaagagtagaccacataccactgcccttcatcggctccaaagtggggtcccaatttctgcccctacagcccctacagctgcactgtgcggcgagccacttcctgtcccagaagtggtctcatgtcatacttggaagcctgagccctcgaaggggtgcaggatgataccgtgacccttctccgatttgcatcttcctgatagcacattaggtttaacatcccctcataggctccactggccgtgagtgttgcctgtgacatgcccattcataccttctgcccatgcttctattctgtcgttagcgtttttaaaacaactcgggggtactctgtattgtgctacagcttgatttttaaagctagcacagacagcagggggatgctggctacatgtgtatggtttgtgtatacatgtgtatgcgtgcgcaaatacatgagttacatttttatcgtgtgcttttttcatttaacaacatctcttagagctgtttcatgaaaacaaagtacatctaaaacgtaacttcaattatgccgttgtgtgagcataatatactatatttaagcccttatattctgtttcgatttttttacattgtaaactgctttgtgataaacagccttgaagtccaatcttttcacatttgaatttttctctccttaggagatattttaagtaagagaagcatggagtcaaaggacatattttaaaagcttccttttatgtatggctaaactgatcaaggttttttgctggtgtttgtttttgttttctgagaatgcaaacggctagaggctgttctgccagtgggctgaagtccgtcagcccacagtccccaggcccagccatggctgtgcacctgtgtgcactcggaggggcagggaggggtgggggtgcaggctctgcctcctcttgctcttgggcggctcgttcctggcttttccgccttgaccatgtggcggcctgtctcagatgttctttatcttatcacatggcatgtccatgtgccgctgggcatttctggcacttcgcacagctcctaaacatctgtttgtccctgtggttacacatatcgcccccttgtaaaagtgagcatgtctttctggtccactacagtatttctcatacctaattccaatgcctggcacacagtaggtgctttagatatttgttgattggatttgacaaatccaatgtatgatttgatttgtatgattgaatttgaatgtatgattggatttgacaaaggatagagaaaagactgggagaacgcctcccagcgtcttcattgttgttctatagatcgacgcttctcaactgggccaggaacacacggcgatgtctggaggcatttttcgttgtcacatcagggggtgagaacaattggcacctggtgggtgggggctgggggtgctgcggaacatcctgctgtgcaaagggcagaccccacaacaaaggatcctccccaaagtgcccatagcaccatgtctgggaaaccccgattgacatcgtgcagtcatagggtgcccatagtgccgtgtctgggaaaccccgattgagatcgtgcggtcatagggtgcccatagcaccatgtctaggaaaccccgattgggttcgtgcggtcatagggtgtccatagtgccgtgtctgggaaaccctaaatgagatcatgcagtcatagggtgcccatagcaccatgtctgggagaccccgattgagatcgtgcagtcatagggtgcccatagtgccacgtctgggaaaccccagttgagatcgtatggtcatagggtgcccatagtgccatgtctaggaaaccccaattgggttcatgcggtcataaggtgcccatagtgccgtgtctgggaaaccccgattgagatcgtgcggtcatagggtgcccatagcaccatgtctaggaaaccccaattgggttcgtgcggtcatagggtgcccatagtgccgtgtctgggaaaccccgattgagatcgtgcagtcatagggtgcccatagcaccatgtctaggaaaccccgattgggttcgtacagtcataggttgcccatagtgccgtgtctgggaaaccccgattgagatcgtgcggtcatagggtgcccatagcaccatgtctaggaaaccccgattgggttcgtacagtcatagggtgcccatagtgccgtgtctgggaaaccccaattgagatcgtacggtcatagggtgcccatagcgccatgtctaggaaaccccgattgggttcgtgcggtcatagggtgcccatagtgccgtgtctgggaaaccccaattgagatcgtacggtcatagggtgcccatagtgccgtgtctgggaaaccccgattgagatcgtgcggtcatagggtgcccatagcaccgtgtctgggagaccccgattgagatcgtgcagtcatagggtgcccatagtgccgtgtctgggaaaccctaaatgagatcgtgcagtcatagggtgcccatagtgcggtgtctgggagaccccgattgagatcatgaggtcatagggtgcccatagcaccatgtctgggaaaccctgaatgagatcatgcggtcataggtaattttctcctttttctttgtattggctttccaaattctctgaaataattttgtagttaaaaaattacttattaaagagatattcttcactaatacaagctggggaagaggaggcagtgccgcagtggggggtagcctgaccacagcacactgctcctgtctgcttctttttgtcctgcatggggaattttggggtgccaggttgaaggtctgcacgcagcctcaggcctcagagcacttggacatttgttctagaaaacacccccaagatgtgcccactctgtggtttgccaagtaagtgagcccaggaacgcaataatttactcaagtggacagaattagtgccatttagggagaggggctgagtgctgtattgaggggcctggaagccgtcggggctgggctgggtccggacttgctaaacctatctgatctgacacttgcgtcaggagaaaggtggggggcagctggtttttgtgggtgacctgctagccagggcacttcctgcggtagatgagaatgtccaccacctgcgccctccgaaccgctttattggactaagggacatcgccagggctagacacatgccccaccactctgcacgtgtggcgtaaggggctcagcaattgtctaaacagaggaggctccttcttagacagcaaagctgtgtgttttgtatctgttggtctcatttcctgtgggatgtttcctggttgcagcatgtctgtgcttggttagtaagacagttggtccaaagctcttcttctctcccgtggggaatgtgagcagaacgatccttaggtagaaaagcggagaaccagtgcttctgcttcttttgcgtaggtggacaagaaataacagtgggaggatattgtctgtccctaattacctgccctgcatccaatttgctggtgtcaggcagctttcctgaggcaagcccttgggtacactgagacgctaggagggacagcagctccggggcctgcagggctctgggatttttttctgccaggtacacttccccctgcctgcattgtgcagaaaggcaaagatgagcaattgggagaaagacagccccagtgactcagcatggagatattatgggataggggagagctggctacttctcaacccttcccccgcctcgcttgccgtgggtttcagcatcgcgggggctgtggagaaaggcctagagagctttgcaggaccaagtggtggtcgggcagcccgtgctgcaggaggtgaacccgggcatgtgacacggtcacagggactcctccagtggtttaacgtgcagtgtgagtggccttaacacgggacccggacatgctgcctctgggctggggagggacaggaacccgaggcagatccttccaccaaacgagtgttttgctgtcaggacgcagcctccctggaagcagaggctcccctgcgattccgctcggagtcccacgctgctcagtatgcatgatcacagggcgccaccgggatggaacgcacggcgccccgacgtgattttccagagaactgagttccttgaatattaaaattaaccttttttaataacagaaatgatatagtccattgaagtagggctggatttatcttatgacagtgcttgtcatggccttgagtatttattgagtagtttcaaaagttcattaaactcaagagattaaatattgccctgagcagtgccccataaaggggaaatatggtcctattacttggtaaaatgttgtgctatgttgttaattcaactcccttgggttctcatcttctgattcaaaagacattttcccgtgctgttaaatttgaaccttggactgtttctcacagtattcatcagaaactcggtattgcacatttatttcctagcggggtagaaacactggccccccacggtgctctagaaatgtcagatgcattcgtcttccattagcccctccaccatcccctgtgtcactgcactaagtaaagccagtggattgacataaagtctcccgatcagggaaggaggtgcagatactcaccccgatacccaccaagggcagccgagcctcctgcttgagcacatgccttgtcgctcagggcttgacgggatagaaaacgtgaggacagagcagctgcggggcccctcggtgatcagggccgtttattttcctcctaatttcttactgaattgattcccactgaatctctgtagaaatatcctctttattatctcatctgacctgagggccttcatttggtttatacagagcagtcttggtgacattgacaacactgtttaatcggtcctcgcgggagcttccctgggggtgcaggacccagtgttccctccaacaagaggccatctcacgggcgagcccacacacctggagagaaacagaaggcccagcatccggtcttccagtggtgtgggggacagcagccggggggggccggggtcttccttacctcctagcttgtgtatggatcaacaaccaccagcccctctgatgtcgaggacccccagggattggcaaaattaaacctggatgctttgatcgctggcagtaagcgacacgctgaaccacaactttctttccagagtaattctgaatgacagcccagagtggggtctttatggagcaggatcctcacgtagcccacattcgccacagccacttggctgaaccctattctaggtgttggcaaggtaggtgttgagtaacagagacccaaagcatagtggttgcagcgaggatcatcgaagtagacctggctgggtgagagtcactgcagcccctcacgcctctgttgtgtcaggacaagatatgtagctggcagggttctcatgaggattacacgagtcctggagaccgtgcagtgaactcttacaccccagggctcagtgtgtgagagctactgccaccttcaccaccaagacagttgcaccatgggcttctcctcttctgtaaaatgggtctgtaacgcccctggaaaagagtgtgcacttaatgttaccattaacatcatcataatgactgccccatattctattataccaatgtaatctaataacattgctctatctgcatagatcacagaagacgtataatacaaatacttatataaatcattgcattgttattattcatcgagaactatgctgtgtgttttgaaatgtgagagcaggaaggaggccaccctcagctttggaggatttgtaggtgatgttggttcgtgtctcaggttcagccagtcattcctggggaacattttcctctctaaccacagccccagccctttgacctcagtccccaccgatctcagaggtgccccttctcctggacatcttcatttccacccgggaaggcatcactccagcatctcctgccatccaggactctcccgcccctgcctgtccctctcgggcagaacccacctctcagccccagcgaccagcggcaggtgagcagcagcagcaacccagtcctgagaactgcttcgtttgtaaagaaagtcggttgttcccatcttcctggaaagatgtgtatttcttaaactctttcctgtttccactttgatagagacatagagatacaaaagtgagaatgtccgtttctctggcaaggacagtaagaagtaggtgacaggtagcacttgtccttaggctgggccgaagagagcaccagggcggggtgaggactgcggccaggggacagctgagcaccatctgagcagtcagggggcagataagtgccatctgagcagacaggcagcctttcccagtgggtgttggagccagaactgctgcctcctcttccagcctctcaaaaggagccagcaaatccatatttttaggtgaaattatttaatttttaaatgttggaaacttcgtactttcaaaaaaacataaaacactctacgagcccaacagaaggcacctgtcgtttggaagcagtccatggccatggggctgtgagccctcacaaccctgcccctgtcacccccaccccgcccagcagtgattctgaggccccaaggtccatcctggaaaagcgctccctgagctggggcacctgtctggacccccacctgtggctcctaggctggaggttagagtctcctgggagaactggaaatggtaaccttgaaatttgaagccactctcctcctgggaggacaggacactgggcaggacgggccttgggaagtcccaggggggagatgcaccttcagcctctcttgctcctgcctgtcctaatcctgaaatttcactttgtcaaaagaaaaaatgctgaggaactcatccagagaaaaatattttagtcttgtaactccaaaatatagacatttgttattttataaattatatatgggaactcctgtactactgttatttagtaaaaacattcaacataaattgacatgttaaagttgcaaaaataaatttgtattaattattaacagcagaagaacctttttgctcatatatgacatatatacatgcatatatatggcattaatacgtacatggcattattaataacgtatatgatataccatgacataacatatgcatagtattatcaataatgttactagccaggcatggtggttcacacatgtaatcccagcactttgggagggtaaggcaggaggatctcttgagcacaggactttgagaccagcctgggcaacatggtgagaccccatctctacaaaaatcacaagcattagttgggcatggtggttcgtgcctataggcccagctactccaggggctgaggtgggaggatcacttgagcccaggaagtcaagactgcagtgagccaagatggcgtcaccgcattccagcccgggaaacagggagactctgtttcaaataaaaaatgttgctagtattctaaacacttaggttttaaagggcttgctagctttgctatcggggtattatctgaaggcacgaaaactcttaggggagtgtcctgcttaatgatagccagcattgatccatatttcatagtcttattaattggagatgtttgggatgatttcatcaatttaattagatcttcacttgtctttacccctaatgtggctgacagatagcttggattaggactggatgtggggccgccaaatttgtttgagtaaataatacataagttttattggcgctcaggcccatccgtcgtgccgtctttgactcttatgctatgacagcagcagcgtcgagtagttgctgcagagaccgtatagccctgaaagcctaaaatattatagttaccaggtggccttttgcagaaaaagtggttattcccaaactcaggtcggggtggagggtgagggccacatcctggtaccatcctggctacatcggaatttccagggcccttgaagaccgaggtcgaggccccttccttggagacctagcaggcagggagcctgggactgtgtatggaactgagcctctggggccatcatggagctcggcaagaggctcaggaggatctggaaagcacgtggacttcccaggatgctggcagcgtccggtgtttctcaaattgcgttctgcgcatagaccacctggggtgctgccccctcacagcacaggttcctgccctcacctggccatggaactactgagtaacctgtttccctgagcatctctgtgcctaggactggccacggggagcatcctgagaccagcagacctggcccggcttccttggcctggcaactccacttgctgtgcagacttcctcctcctgtctccagcgtctccacgtttctcggctcacagttctggggccctgcggaggccccgaaggggtagcttcttcctccgttcaatcagtcgccataggcacagtgacccatcactagcctaggagggagatgccgggggctggaagccctggggtggggagggatgccccagggctctagtggttttcatgatacactttttaatactacttaaatctttcaactatgtaaacagtatcttgataaaaatactgttttgtttttgagacagtctcactttgtcaccctggctggagtgcagtgacataataacagctcactgcagcttcgacttcccaggcccaagcaattctcccacctcagcccccgcaagtagctgggattacaggtgcgccaccacacccggctaattttttgtattttttgtaatacggggttttgccgtgttgcccagactggtctcaaattgctgagcttgggcaatccacccgcttcagcctcccaaagtgctgggattacaggtgtgcaccaccgcaactggccttcataaaaatatttatttaaatgaggaaaaaccagaaagtcttgagaagtgaggcctcttctgggtgaagtttcttgcgacgaatggaggaggcaggaagggcagctgcaggagggggtcctggtctttttccccaatggggtggtggccaggtcccgaattcatgttgtgaaacttcacccaactgtgttcacgaccttcaggcttccttgcgcatatcacatgcttcctaaacgcatacttagaaaaatacaggcttttgagggctttcccaacgagacctagaatcaccttgatacgccgtcgagaccgaacttgaaacctgggtcttgttactggaggtagccccatatcgccctttgaattaatactttttgtaaatcctgtcattttcttcagaatggcataatcacattgcattgtattttccccatttcaatggtaatagatataaatgtttaaactgcactatagtttttgttagaaaaagaattccctcctgagcagggtcccctgtcctgtttgtgactgagttatcggtgcaaggtggacatacatgcataccttaggaagtggccactgagtgaatggacacatggattggacaaattaataagattcccatgtgccctgaagtctagaaccatggtactgaaactttagcatgaacgcttggccgtatcgcagctgctatttttttttagcgcatccagtgtacagaagggatatcactggtattttggcctgacctgcccgatggagcaggacaaggctgaccgcatgccgagctgcgtgcctgggaaccacatggcaagcttcacctgcgtgtcctgaaccagccagaagtgtgagcttctttccaccgattcacttgctgtgttcatttgcagacagagacttgtattctcacgttagaattgaatgagcattcaagcgtatcagtcttggttatttatcttggaattgataatgtacctccaaagatttccggctttaaatattgacagaggcctgattctgcattatggtagatttgcattctagatttcttcagcttatgcacggaagggacaatgttcctgagagcactgttaacaacacaaaaggaaaactatttaatgttttttgcgtctatcacctctaagggtggagagagcagggtggatggactctgtgaggcagggctccccagggaagcagaatcatcggatgtgtatacacagaggagatttcttttaaggactaggccccaagggcatggggtctggcaagtctgaaatctgcagagcaggctgatgggtaggaggagaccagggagagcgggtgtggcccttcgagtcccagggagtctcccggcgaaattccctcctcttctagggagccgagtctttcttaaagcctcaactgattggacaaggcgcacccacaccatggagtttcatccacctcactccatgtctacgaactgaattgttaatcccatctaaaaatatcttcaccaccacattcaggctgggtacctaggtctgggtactgtggcctagccaaattcgttaattttgacacatacacaattatgtcttggaggaagattggccttgcgtcagtcattgtgtgtcccctttctcaggccagcaggtgtgactggtgtgcccagagcaggactctcacagtcagaccccggccacagcccagtcctgtaggccctgttgctctcacattttcagattgtgcagcctctggccatggaggtgtgatgctgatgtaggttaaatgctgatgtgggttaaatgtggatgtgggttaaatgctttgtaaagtgaaccccaggtcattatttatactaagtccttaaagcctaggcctaccactcagaaccttaacaattgtttcaggaggaaaaacccacttttttttttttttttttttttttgagacggagtctcactctgtcgcccaggccggactgcggactgcagtggcgcaatctcggctcactgcaagctccgcttcccgggttcacgccattctcctgcctcagcctcccgagtagctgggactacaggcgcccgccaccatgcccggctaattttttgtatttttagtagagacggggtttcaccttgttagccaggatggtctcgatctcctgacctcatgatccacccgcctcagcctcccaaagtgctgggattacaggcgtgagccaccgcgcccggccaaaacccactttttaaaaagattttttattggaaaatttcaaacgtacccaaaggtagagagcatagtatccctgagcccctggctcatctcccagctccctctatgaccaccccaggcctggctcagcctttgcaccccctctgccctccccaaagcctcacctccatcatgaggtcctatccggttggtctatggtgtgtgccgggcctcgctgcaggacttggcaaattggccactcacgtccacctgcccatccatcacccacgaagcacttggcctctccagttccctttcagtgttttttcaacctgcctcttttttagttcctgctcacatgtgtgatgctgggctcaggagatcctgaggggaggaactcagagcctgccctgcaggggctcggggacaatggtgccttccccggcagggtctgaggggctcagcacaggttgcccactgcaagcccagtggttctcacgcactcctgctctaggcaaccaaccccctggacagctgctttggtgaccagtggtagggggaatagctggatgggcccatttttaccaggatccctcctgtcatttttcaaaccagtcccccttacagctgggcagcacgttttgggacaactctcccacaagtgggctgtggcctggccctaactgtagagaacagccatgcccaggctggcttcaatctgactgtcacagctctgatggcaacacagaggcccccaggtcttcggggggcttctctggagggagttagtgcctcccaatctgcagaaactcctggagacctgaatgtttcgtctgtcaaaagatgatgctctacaatcagagctttcctgtgatcaacaggacctctcaggagttatagttattggaaactgaagtattcactggaaggaaggaaaggaaggaaccctttagggctgatctgaggtggaaagtgatgctgcactgggggtagctttgctgcatcagagttcagggaagaggacccagtcctccttgcagcctagatgatccccggaaaccctagttctgctttgataagagacatcccctaaatctcaggactactgtcaaaggtttatttcttgctcattctgtatgttcccatgaatctgtagggactctgctccatatggtcacgcatggatccagtctccaccgtctcatctctgcaccatcgggaacacataggctccttagtcactgctgtgggatgagccccctgggagcagtcctggccttgggggtggggatgcgagaagcttctctgggtcccttggtgggacaacaagggctcctggctgcagcaccagagggcttcggggccggcctggccccacctccgctggtaccatcacctccttgttgttctggcctttctatttccaccggccctgcccccttccagagcctcatcctttcatctgcaccttgtgagctcctaactactttctaagttgacgtccctttgccactgtagtcattctttctctgtattctgctttcttcagatcttctttcacagtcgccagcatgcagatgcaaccctgtcatcttccacccatttcacacctggccctccagacaagtccagagctcctagcacggtccctagaccctgtttctgggccatgcaggcctctccagcctcatgctcatcactgggcagacgtactgtccttggcagactctgaagtgacaacctttaggaggcagggcctacccactgtcacccagataaacctgaagcctcttcccatgcaacctgtacttttcactccaaatttcaaaaatgcaattgtaaacctgctccaccaataagtagcccatgggtctttgagaaggaaggatctgtatcttttggttctgtgcctggtacattgcaggcttcagtccctgttgtgcgttgaactatgcagaaatcatccatgccatttttttgtcagacaaaaagaacagggtcagaatctcacgattgcaccccaccctaccatggggctgtcatgaatgttgtgtggcatcttttttgtttgaaatgagagaaacgtaactcgtgctcgtgcagccaagaggggcatgggcttcttcacataacctgaagcgcaaggacagcctggcttcaggtgtggctggatccaggttttcaaatgtccgatctcttgaacacagtttcttcatatggtgggcactgtgacatatcatgacctcttagactgccagcctcttctcataactgtgataggaatgtcactctgtctggtctggtttaggacagaattctacacatctgtagattctttggccagggagtaaatacaatgactaggcctgggttacggacccacagctgaggccccagtgtaagtgaagggtcagccctgcagtcatctgctggaacggaggcccatgaaagaaggagaagggagcccaggggacagaggccacagtcacctgtgacaaaagctgctaggaagaactgaccagctgcacatgcatttaatgatggacttctataaccatcttgttcacaggtgtatcacggaggccagcagtggttgctcagatgttgtttgtggaggctggaaacatccctgggtaacatttgtcccagtcacctagctacacagcacagaatggatttttataataatggatatttgcacagagccgctgtcttaaagcatatacagccatctctcagtatctgtggaggactggctccaggacttccccaggataccaaaatccaaggatgctcaagtccttgatgtaaaatgatgcagtatttgtgtgttacctatgcacatcctcccatgtactttaaatcacctctaggttacttataataccaaatgcaatgtaaatgctatgtaaatagttgttatactgtattgtttatgaaatattgacaagaaaagtctgtacatgttcagtacagatgcagttttgtttgtttgtttgttttgaggcagagtctcactctgtcacccaggctggagtgcagtggtacaattttggctcactgcagcctcctcccgggttcaagcaattctcatacctcagtttcccaagtagctgggactacaggtgcacaccaccatgccctgctaatttttgatttttagtagagatggggtttcatcatgttggccaggccggtctcaaactcttgacctcaggtgatctgcccacctcagcctcccaaagggctgggattacaggcatgagccactgtgcctggcccagatgcagtttttaaaacatattttcaatcagcagtcggttgaatccatggatatggaacccatggatatggagggctgactatctacatagcatcttatctgaaacaggtgttaggccagtttatagatgaagaaacagaatggttaagccacttgtccttttgtcactaggatggagttcattggagaaaatccatttttcctttcttccttatttacagatccacaaatttacataggacaataatccacccaacaaaaaggctgatttcccaggctcccttacagcgaagcatcaccctgtcactaagtgctgaccactgtgattaagtggaaacattttgtgggacttccagaaagttaattttgcaaattttgcaggggtctctcctgcccccattctccctttctcctttttcctgcatggaacacagctgtgatagctggaggtccagcagccaccttggaccatgaggggatcttgaagaggcaagctacacatgtacacagcagaagagcaggaggcgggtcttgatctttgccatcctctttgctactatcatcctcctgcattgccagattttgggcttcacttacaggagcaaatacagccctgtgggtttgagggtgtttccttgtgtgcagttgaacctgcagtccttcatactgagtaacttattttttctggagctgctgagtttgggggcagcggtggtactgagtcccagttgttgctttgcttctcttgggtggtcctcataccctgaggtctacggtcccctctctagagatccggatgttctggagagtggccactttgtgggccctgtctccctggtgtcggtgccataactcaaatcaaatcatcgtggaaaacatgcaggctggattaagagactaggacgggactttttccctgactttgtttctgcctggacctcaggcatgcggcattattctccagaaggccgtgtgctcatgcagggctgtgctcacctcttgtgttcttgggtctgtacttcccctcaggaactccgtgtgtattcctgatttcgcacgggacaattttttttggcacagatagtagacttaaattgtctttatcccaaaacccaaactgagaggggaaatcaacatctttaacatggaatagcttgtcccctttgtctacatacagggagaaaatgtctggcaggacgctgtgtttcaggaaaaagtctgcaaattgcagtgtgtgatctccagctcatgtaaatatctccacatgttattcttaattaattatattttattgaagtaattaggtaactgacaacctcagttaagtcctaatgaaaggaccatgtcttttcacatgccgttgatcagaaagtacagcttggactcccaggagctgggcactgggcaaggagacactgggcaggtgcagctgagctggtgcagctgagctgctacagccaggcgggtacaggggtcctgggccaggactcccaccaccacctgtcccagggcacatttcttctccttgctaaggacaagatgcttctgcagcccccgcccccttcctctgcttgttcctgattgttttaatttccaaaaaccatgatgaggacagctgctgaaatcttaaacaatgctgcttctctggaaagttgggttaatttgtttaattttcacacctttcaccctcctccacaatggtagagtgcttttgtgtcaaggcatcaaataaatttcacgcttcttgccttttctgaaatatccggtggcattaaacgcacccagtgcacctggctccggcccgaggcttcgagacttaattgtggttatgacgatctgcaagaggaggcctgattattcccgacgccacttgcattgaggcacagagacaacgtgggcaggggatttgggagaaaattgcattctgttttcttaaggccaaatttcccattaatctgagctgcttcttaaggaaaatgtgaaacatcccgaggcttcagggacttgtgtgagaatatttaggctttttttttttttctttttttcctagggagaacattattaagaaaaagctcaggctgggcgtggtggctcacgcctgtaatcccagcactttaggaggctgaggcaggtgaatcataaggtcaggagatcaagaacatcctggctaacacggtgaaaccccgtctctactaaaaatacaaaaaattagctgggcatggtggcacgtgcctgtagtcccagctattcacgaggctgaggcaggagaaccgcttgaacctgggaggcggaggttgcagtgagctgagatcgcgcccccgcactccagcctgagtacagagtaagattcagtctcaaaaagaaaaagctcccttatttctactggggttatcaataagtgaatctaaatgagtctttgaggctgattttgtttcggggtcccagggagtggatgtggagaggtcctccatcccctcctttcgaccctgcctccctccccgggatgcgctgcgtatctgtgtccctcagcagaagccatggtcatctttttctcccacgcgccgttctcgggcagtgattccgtaatccccctcctgtgaactagtgtgccacttccatactgatcacgctagtagacatatatcctttatcaaacgttctggaaatcactcatcaccatggtgctgatgttttacagtgcggccctttatgattttaggggctgtgagcctctcccgtcctgtaaagtaaagataaaaaccaaagaaactgctcccagagtcagtgtggtacaacgacgcgctgtcaccgcagccccaatccctggtgttcttactattagacgagttgatattctcatgtctgccacagaggggaaaatgaaatctgaggctgaagtagaaatagaacccaagggtctcaactcctgttttaggtcttttttatagtaaatatttagactaggtctggctatatatattatagctatatctatgtatctataattttttttttttttgagacagagtctcactctgtcacccaggctggagtgcagtggcgcaatttcagctcactgcaagctccgcctccctggttcacgccattctcccgagtagctgggactacaggcgcccgccatcacgcccagctaattttttgtatttttagtagagacggggtttcaccgtgttagccaagatggtctcgatctcctgacctcatgatccatccgcctcggcctctcaaagtgctgggattacaggcgtgagccaccgcgcccggcctataatttctataattgatgaacttaatcacgtgagttcctctatagatcataactgtcacttgtcccataaacccagccccttggtgtggatcaaaatcttccacgtctttattgggagcaaagacctcgcacttggcttgcaaggttacaatctctgtcgggatttttcaggatcccgaaagcccaggtaatgcccgtctggtacaccaatacctggtttcaccccagaccaccatctgctctacccggaccaccatctgctctacccggaccaccatctgctctacccggaccaccatctgctctgcccggaccagcatctgctctgcctggaccaccatctgctctgcccggaccaccatctgctctgcctggaccaccatctgccatctgctctgcccggaccactgtctgctctgcccagaccaccatctgctctgcccggaccaccatctgctctccctggaccaccatctgccatctgctctgcctggaccaccatctgccatctgctctgcctggaccaccatctgctctgcctggaccaccatcttctctgcccggaccaccatctgccatctgctctgcctggaccaccatctgctctgcccagaccaccatctgctctgcctggaccaccatctgccatctgttctgcctggaccaccatctgctctgcccggaccaccatctgctctccctggaccaccatctgccatctgctctgcctggaccaccatctgccatctgctctgcccggaccaccatctgctctgcctggaccaccatctgctctgcccagaccaccgtgtgctctgcccagaccaccatctgctctgcccggaccaccatcttctctgcctggaccaccatctgccatctgctctgcccggaccaccatctgctctgcccggaccaccatctgctctgcctggaccaccatctgccatctgctctgcctggacctccgtctgctctgcctggaccaccatctgctcttcttggaccaccatctgctctgcccggaccaccatctgctctgcctggaccaccatctgctctgcccggaccaccatctgctctgcctggatacagcgtcaaataagacagatgtctctactgtccccaccaagcaaagatgtaccacttgcaaggttgctgtgaggtccctgtgaagactcaagagagccaacacaaagcctcctgcaacagttagctgccaaacccaactgctgcttctagaacagtttcccattggttccgtatgtggctgggttctttctcattatgttgacatcgactgaaatgtcaggtccttagagaagccgtgcctgccaccccgggttctgtctcttccttgagcttctcagcacctggcatctagcggttgatgccaccttcacctgttgtcaccgaaccctggggacaggtgtggctgactcgctctccaccgattccaagcacttgcaactctgggatttgttcagacaaatcattgtgggtgaatacgtggctcagaaaggcctaaatggctacaaccactttagaaaagacttcggcagggtcttataagtaaagtgacacacaaacttccctatgaaattgctccagaaattatactcaactgggtattttccccagagaaatgaatgagtctgtcctgataaaacatgtgaaggaatgtgcagataagctgtattctagtagccccatactggacgctgcccaagtgtgcatacctagagggacagatgagaggaccgtggtgcagtcacaggatggaacacagcacggtgatgagtaatgcactgtgcacagtgacatcagtgactgtcatgtcattacattacatggagcgaaggaagccaggcacaaggggagacacactgtgtgatgctgtttccatgaagtccaggaacaggcaacgctaattgtcttagctccctattgctgccataacagaggacgacaatctcagtggcttaagcaacagaagagaattctcttactgaaagccacctgtctaaaatgcagcagcaggtcctgcttttcctgcaggttacagggggaagtctgtttcctcatcttttcagcttttaggagctgccttgccccactccgacctctccatcgtcaagtgtcctctcactaggactgtcccctgcctctctcttataagggtccctgagattacacttcatgctcacccaggcaacccaggatcatctctgcatctcgaactccttaacttcatcatacctgcaaagtctgtaaaagctctggaggttagggcgtgggcatctcaggggagccattgtcttcctgccccaggaacagatggtgatgcggtttaacttggggggtggtgttgcctgggaatggatgaggggagtgttctgggggctggccatgctctagatctggacctcagacttggacacaggcacatgcatgagtaaaagttgaccagaccgtaaccgtagactcagtgcacatcactgtgtgtttgttacacttgggcacaaatctaaaacagaagagaagggtaaagctaccctcctccagatgttgcattgcctgtgtgtagtgcccctgtgctcagagggtgaacaaagcaataaccaggccctgtgttagtgagcgtcatggagacagtgtggggtgcgtggaggtgaggcgtggagcagccagctgccaccacctgtgttttagagccccttcctggttccatttcattttgcatacaacaccatggaatcacatgatggagagtgaagcagcttattttttatatggggcccatgacagcatagtgagtggggcttttacagatgtttatggaagggaagttctttgcgatcctcagtaccccaggccctcagtggtctccaggatcccagccagatggccacggggtcacgggcccactgggactgggtcctacacacacagttgtgggcttttggagacactgactctgcacaggcttctctgcttttcaatgtggcgtttaaggttccggaaactgtgcagtttagaaaactgctgggcaggtttgtcaaaggcaaagcaccctgggcattttcaagatgtttctgtcttcaaagacccagcttgggctggcacagatgccaaggctgcaccggccactccatcacgtggtggggacagctctcacatggctcggcagagtggctgggcgcctcaccatggggagcagtgctcctgaccttgaaccctcccccacgtagtgccagcatcagagccatcaaataaacctcaaagcagctgggactcagagagaacttcactacatccctggaacactctttaaataacttcagactcagcatcaaaaggggttccctccctccccataaggcaataaaatgtgttcttttcagataaatatttcaagaacagaccaactcatctggatcaaatgttacctttttaaagatgcaaattgaaaattaagcatccaacacaaggattccctggagccactgggaagggctgcatgctcatcacacccggggccgcctgggcagtcgggactcaccgtcgccaccgccctgagaggtatcgcactgtgtgcatttcagaatcatttcaaagaggcagtaaggaccccgatgcatgtcctaagcaggcagagccgctgcgtgtgacacaggttggtcgcagaaatcagtctacagagataccggcaacttttcttctacactgcactttcctgcggccctggaatgccatttattttctaatattcccaatttggacatttttaaagagaatcaatcaaagctaccaaagaaatatgacaataggtagctaagaatattcaatgcttcagaagctcatcatcataattaacggttggggggcttatagcagcccaggctttgtgttaagagattgatcaccatcttattccatccttgcccaggcctcctagtcagtgcaacttcaccacttctcccagaggagaactagataactcagaaaagtgaagtggcctgccacagggtgtacagtgcagctcagtgcagagcggggatctgaaccaaccagtctgaatcctgacaacaggctgcttgatcccatgagaattggctcttacactgagatgggacaggctagatgtatggagaagcctggtgacatctgaatgcctttcctatatgttattagggaaaagaagagtaacttgtgttcatctatccatccatccatctacccatctgcccacccatccattcatccactcacacacgaatccatccatccactcacacatccatccttctgttcacctgttcattcctcccgttagtctctccattcttccatctgtccatcatcttccattcctctcactggccaatctatccatccattcatccatctgtcaatcatccatctacacatccatccatcttccattcctcccactggtccatccatccatccatccatccatccatcctctcacttgttagtccattgacctgtccatctgtttatccagtcatccatccattcatccatccatcatcttccattcctctcactggtccatctatccatccattcatccatctgtcaatcatccatctacacatccctccatcttccattcctcccactggtccatccatccatccatccatccatcctctcacttgttagtccattgacctgtccatctgtttatccagtcatccatccattcatccatccatcatcttccattcctctcactggtccatctatccatccattcatccatctgtcagtcatccacccacacatttgtccttccatccatcttccattcctcccactggtctgtccatccatccatccgtccgtccgtccatctatcctctcacctgttagttcactgatctctccatctattcatccagtcatccatccattcatccatctgtccatcatccacccacacatccatccattcatccatctgtccatcatccacccacacatccatccattcatccatctttccattatccacccacacaaccgtccattcatcctcctgtccatcttcctacttgttagcccatctatcatttcatctattcttccagtcattcatccgtctttccttccatccatccatccatccatccatccatccatccatccttgctagattctaggtattccatgaccaacaaggctaatgaggtgcctgctttcacgggtctaatgttcttactgttcattcttcaccaccctgtaccaccatggaaaagggggaactgtgtagtttcctgacaaggccttcattacatccccactgagcatccacctctgggttcatctagtatgactctgctttcaaaactgcctcagtcactccctcatgcaaggaaaagccgcattcattgatgtaaagactgtgcctagataattgccttggcagaacctcaagccaaactctctcatcttttttattttagttttcaaatgggcagccttcccacagggtcaaaacggcccagcttcaacctgggggctcagctgctggctgggctgggcacgtggtgctgtctgcttcagggatgccaccagcagcaacattcaaacatggcctgccatatgctccatgtctacgttgaacagctcattttgttcagctctctctgatgcagagcaggatttgagctcaaaaaaatcaaaatgaaatgagcagtgcctgctgggcctggatgggaagtagtgtgggaggttgggggtgtgtctgggcagggatatgtcagcactgtgggccgatcagagtgggcagctggccggcatgggcacagtgcacagaagcctccagccaggccccgatcagtgcccacaggcagtggggctgccctgtatccactccttagcatggcccaacaggggactgggtgaggccagagagaccaaggcctgatttcagcagggtgactgtgggcactggtcatgcagagctgctgcctcatccagaaggacaccctgcccttgagccaggatcaaggccgactctggatgggcagagccaaggaaggaggcctcttggtcactgatatgaccaaccctcctctgcaggcaccagccagtttctgttctgtggctgccccttgcctggttcttacccagatcatggtgggtagagcagggcctctgcccttcagtctagtctgtgctaacagaccaaagtgaacttcagcaaacactctagcaagaaactctgggtccgtagcatgagcccatgatggctggagctggctctcattgactccccagagccgtctgtgcagtccctccctgaccatggtgagcaagggcatgttggtagcttggaactggccacggtgggaatatttacatgatggaaattggcaaatgctatagatctgcctcctccccagagtgccggaggttacatttatcagcaccccactggtttgatgccctaaagtctgaattcctcagcatagcattcaaggtccctcctggttttcttatccaactcacaatggctacagagaaacagagaggtggaggagggatttcttggctcttataatttaatttctaggacatcctgagacatagttagatcctagggtgctaactgtgtgctcaagatgggcccagccccaccttccagctctgccttctccacgtggtggtctctgccagctccaggtcgactttattcgtggagttccccagaagctttgggactgcatctctccggcctcatggacatcttgtttttccttcgaaccagtccaatgaaatggaatgttctagatggccaggcctggctcatatgatcgccctttaagcaggaggggcagagtcagccccactaaaccccagggtcaagccctgggaacgggaagagtgtttctccagggagaccctgaggggctgtttccagaggaaggagccaggctgtgttgatagaaccctgcctaggctttgcttctgtcctctgcctctgcgaaatagtccatcccccaagccactcctcctttccatgttccaggctcttggtgtggggggccacctccctgcaaacacccttcccggtctttgcatggttttaaatcatccttcatggcacccaaggccccccttcccatcccagcctcagatctggaagctcccctccccattcgcagagcttccccgccccccacccctggcccatgctccctttccctgcctgggtggcctccttgcctttcaccgctggcctggaagtgctttccagctggttgtgtttctctttgtacctcccacagcttccagcatggcttttggcttttgtcctggcagtcaggaccctagtggaggggaggggtgtgtcaccagcttgccctgttccaaggctgcgtgagtggttgtggagccgggcttctcctcaccttccaagtcaaccactgcctagctggtgacctgagtctgtaacaagcccccctgagcctcagtctcctcatctgtaaactggggaggtggtgggactgctgcacgggatggcatgctgtgtgtcttgtgcctaacacacccccgcacaactgccacgccctgtgcgatggctgttaccgccattattgtgtgattcctgcctggccatggcctggcgctggcggttggatgggccttgcacatagtagatgctcagatattcaccatggagtcccctcctgccagaacttctctcccactggttctcaaggacagtcacttacaaaagcaatttcttggtggccacagatcttcagggtcatcccctgtggccagctctcattccccaagggcagcacttagtagggccttttcagcagcctccctatctccatcgtgacaaagacccacaggctgggcagcttcaacatggctcattttcttaccattctggcagctggaagtccaagtccacggtgtctgcagggctggtttctcctgaggcttctctccttggcttgtggatgccatctccaccctgtgacctcccaaggttgtgcctctgtgtgtgtcactgtccaaatttcctctccttaagaggacatcagtcccactacattaggagccaccccagtgaccccatttcacctccattagctccttaaaggcgctaccgcaaatacagtcacgttctgtgctgctgggggttaagactcagcatatgaatcttggggaatgcaggttagccggcttgatgtcccatgtaacgtgggtttcccagcgtgaatgacccatctcactggagtgggcagggcatggcccatgcctggctcagccctgatgcctgcaggaagtgggtgtcattggtagaggaatcagaggaatggactcccctgcatttgggccactgagtcctctgctgctttcactgtggtgtgaggtgacttggaaaggagagtggagtcagggagagccctgcgtggaggccattctgagacaggcaggcaccccagccctctccagctggcttgctacaaatgcttgccgaccagctcccggcaaagctgactcctggcattatcacatgattcaactgttctctgtgcggcaatattaataatgctcactattgttgcaagcacagcaggaagcggccgtgtgatggggtggtggaggggggcattgctataaacaggggcttgctggcagagagctcatcctgtccttagggcagaaattaatgtcacctctcagaatcagaattccgattagagctgcactcaggaagtccctccagatgggagaggacattgtctgaagtccttagcagagccgagagctgtgtcccttgcagagccagcctgcctcctcccgtggtgagagtggcagctggtctggactcgtcctcttcagtgagatgcctgtgagtgcccaggaggagctgccccatgcatgcagtgggggtgtgcctctccatggaccggaggtcaggaggctgatggatgtcctgcatccctcacggtgactccaaagattcaaccagccggagggaggctgggcttttccgctagctggaaatttcagaacccttggcccacattcgtcaaactgccagctcagaagtgagtggtattcaaattcttttcagtggtggttctccaagtggggtccccacactagtggcatcggcattactttgggagacgttggggactcccattctctgcccccctaccccagacctgccgaagcaggagctcgggttgaagaacctgcctgtaccccagccctgtgctgccttccagtggaaacatggtagagccatggagggattttaaatgtcttagtggccatgttgaaaaaaaagtgaaaagaaacagtaaaactaattcttattgtggtgaatgtatttacaaaatttaaccattttaaccattttttatgtgtacagtcagcggcattaggtacattcacagagtcatggaaaccatggccactgtccatctccagaatttttatatctctccaacctgaaactccatccccattaaacacgcactcccagccgcactctcccccgcccctggcccccaccatcctattgtttatttctatgaatgtgactgccctagggaccccaaacaggtagaatcataccgtatttgtccttttgcatctagctgttttcacttagcatgatgtccttaaagttcacccatgttatagcgagtgtcagaatctcttttttttttagactgagtcttactctgtcacccaggccgaagtgcagtggcacaatctcagctcactaaaacctctgtctcccaggttcaagcaattcttgtgtcttagcctcccgagtagctgggattacaggtgtgcgccaccatgcctggctacttgtcgtatttttagtagagacggggttttgccattttgcccaggttggactcaaacttctggcctcaaatgatccacctgccttggcctcctaaagtgctaggattacaggcgtgagccaccatgcctggcctctccttcctttttttttttttttttccccgaaacagagtcttgctctgtcacccaagctggcacgatctcagctcactgcaacctctgccccctgggtttaagcaattctcctgcctcagccttcctagtagctaggattacagatgtgtgctaccacacctggctaatttttgtatctttagtagagacagggtttcaccatgttggccaggctggtctcgaagtcctgacctcatgatccacccacctcggcctcccaaagtgctgggattacaggcgtgagccaccgggcccagcttctccttcctttttaaggctgcgtaacattccatcatagggtagaccacattctgtttatcccctcattcacgagtgaatgtttggctcattgtttctcacagctgctgcgcaatttacattcccacagcagttcccaaggttccagtttctctgcatcttcaccaatatttgttattttctgtgttttgatagtgaccatcctaatgggtgtgaagtggtatgcaatcagtttcgtgaacgagtttgtttaacctagtattgctggaacagtattatttcagtgtgtaaaaatactcagagtattaatcaggtattttacatggttttaaaatttttattttggaggaagcttttgaaatcggtgtgcattagacactcacaccccagctctgctcagaccagacccattgaaggcacttggcacaggcccgccccttgacgccctgtggacagcatggcgctgggcgagtctccccgcagctccagaaagggacagaggacatagcttaccaagtgtgattttagggcctgcagctctattcattttaatgaagggtatctttttgagggggtgaaatcttcggacagttttgtcctgactcactgcctttggggagaagtggatatctgtgctcagacacagaggctgcacatctcgggggttcttccaattgctggtttgaaatgacttggagtggtggagaggctgagctggggaggtgtttggaaacaccaattcagaacacagcaagactggcgcagcctggcattactgctcaatagaataatatgtggcccgcagagctgactgtgggtgcttgggataaaacccagattctgtggcctatttccttcttcttcagaaaaggactctgttgggggcatgcagtcctggtctccaagagactcactctttctctcttggtcgtgctctctcttccccctccctctcactcttttctcccactctccccctcctccctctctgtctttctccatctccctctccctccctctacctctcttctctctcccctcacccctagcccctctctctcctccctctccctgttaccagcaaacctgctgaggtcacctattccaccttgagccagctgtggggtgtggggcccgagtgccagctgtttcctctaaaaatatcacccacgtgagccagcaccgttgggtccggagttgggagttgggaatcgggccatcggaacatctccccttctgggttgattactgtcaacaactgtcatccctccctggccctgtttctggctggaatgcatttctgtatcgctatctagcagggctgtaaattggcagcgtggattggggagcaaatttctagccgcttccctctcagaacatgcatttctcctgacttgtattactcattttacggctggagacaggtgcacatggcgggaagtgggcacaggagccttgacctgacaaggtcctcgaggccaggcgaggtctcaggaagtctgagtttggaaggcgccgccagagactgcacttcagtgtactgtggtcctgggccaaggggccaggccaggagcagcagggcccttcatgctcagaggcccacttggaagagatggagcctcccatcccttgagttttctgaggggtgcacatgttctgttttagggggatgctgcattcgaggcacagagaagccacctgcttccttagacagatcacaagcagaagtctcacctgcctttgctcttttgctgttaaatggcaaatgctgattaaatggcaaatgctgatcaagaaagtaaaggtgtccattggctttgtgctggccctttggtctcaagagacagagaagacagatgaaagtgaaagatgagtttgcaagcttcagcccaaacttttttcttttttttctttttttttttttttccctgagacagagtctcgctctgtcccccaggctggactgcagtggcaccatctcggctcactgcaagctccgcctcccgggttcacaccattctcctgcctcagcctcctgagtagctgggactacaggctcccgccaccacacctggctaattttttgtattttttagtagagacgggatttcaccatgttagccaggatggtctcgatctcctgacctcatgatctgcccgcctcagcctcccaaagtgctgggattacaggcttgagccaccgcgcctggccaaacttttttgactaagtgaggttattgtgtgagctggttttcctccccaaacctctgatttcctatctatcagatgggctgataatggcacttgctctacagcccagtgaaatcgcgtgtggaggagttagtgtcctggagggtgctgttacaaagcgccgtcagttgggcaacttaagacaacagcagtttattcttttaggggtctggaggccggaagcctgagatggaggtatggacagggctggttccttcaggggctccgagggaggattgcttgagcccaggatgtccaggctgcagtgagctgtgattatatggcagcacccccacacccccgcatccctctcccggcttctggtggctgccagagacagcccttgatgttccttggcttgtggccacatcactccaatctctgccttggccctcataccactttttctgtgtgtctgtgacttctcttgtcattggatttaggacctaccctcatccaggttagcctcagcaaagacgttttttccagataagattgcacacaccgggtccaggtgtacatatctttctgggggccactgttcaaccatgacagtgggtcagtgttttgtccatggagaaaggcctcgcagggtttggtgggactgctggttatgggggtggggctcactgcagacgtgtcctgagcccgagatcactcgttccccgcagcaggtgcagctgagagcagaggcggccgctttgcccagggcggtgcttttggttcttgtctctgctcatcagtttctatcgtaccccgacaaatacatcccctcccatcacggctgtttctggggactataaggatctttctgccactgctaatccttacagcttaggcaagttcgtggtgcctcagagatgaaacctgagagatgtaaaaactcccttccttggaagttctaaaagacacattaggatgaaagagggatttcaaactctacatcctggggtagctttccagtcggctggtgcacagagctaggagaggggatcgtttggcttccaggccagccacagcggagtttccaccaggaaggttctggccctgtctgcctccccagctccctccccaccctcccctcttctgcagtcctagttgcctctctcttcccccaaagccaaggccaccccgctccaggcatggcccatgctgtcccttctgctgagtatacaccccattccctgtgtctggccaattccatctaaccctcaggcctcagcttaagccttccaccccggagaggccatctggacagccccgtggctggcacatccccctgctgtgttctcctaagtacacatgtgtgctccctcacagccatcatcagaattgaaattatacaaacattggcatcattcagtcggtgatcatcctgagggcagcttcatgaaaagcacccagcacacagtaggtgtctgttgaatgcactatttgcaaagcctgtgcattctcattgaattccagccacagccctcttagtgggagttgtaccaagagcatagagaggtgaagggaccccctgatgatgccaggcctgcgaaggggcactaggcactcacctggagagtgactgcaaatctgggctcttacaagtggtctccagccactgtccctcaggagtgtgagcagctgcaggaatcctctgccccgagagcaagcctccctctgcaggcagctcctcctgctgtgcggggaaacgcagggagagggagcgggtcagcaccggggcctggaaagggctgaaagaactggaggagggaccactcaggggtgctccttgctctggaaggcattgatcttgccactaaaggccatggaatgaaagggtgcaggaaggaaagatgccatctccagccagaggcttccaagtgcagtgctcccctccccacagggtccccaggggtgggaagatctcaccacaatttctattgactgtgactttgtcgccactgaaaacaaaataagcaggcccagccattctgggaaaccatgtggcagtgtccagtaaagctgagcgtgtgtatttccagggatccagcaactctcttcctcacaagacctaacagaaacccatgcccaggtgcagccaaagccgtgctctggaaggttcatagcagcactcctcctaacagtccaaagttgggagtgagccaggtgcccatgcacagtgcactagtgaatagggtgtggcatgtcccacaggggaataaggtcaggagtgacccaggtgcccatgcacagagcactggtgaacagagtgtggcatgtcccacgggggatgataggacaggggtggcccaggtgtccacgcacagtgcactggtaaatggagtgtggcatgtcccacgggggacgataggacaggggtgacccaggtatccacacacagtgcactggcaaacagagtgtggcatgttccatgggggatgataggacagtgacggcaaggcctgccagccatgtggatgggtctcagacgtgctgtggaatatgagtggcagcttccatatgttactcatttctatggagctaaagacagggaggggcagctggtccttgcaatgggagcccttacagcccttttccgtggggaccctggctgggaggggacacaaggtaggctcctggggccgatgtcttccccttggctggctggtggctgcatggcagcgtgcatttgtaagagtccctcactcagagtagattctttcctccatgtgcacaacacttcaatttcagaaaagcactgaggggtctttattccattccataacaggaggagatgtcataatcctggacagaatggaagctaccgaaagggactcacgtgaagtgcatagacgtaattttgatcaaaagaagttaggcagaaaaggaagctttctggatgctttcattgataggaaatgcaaaacagtcaaactcatctccgctatccaaagccagggtggaggttgcgtttcaggatggagggtgtttcatggctgaacggaatcaaggggccttctggggtgcagcttgcacagagcccccttgtgaaaatccatgtgcagctctacacttaagatgtgcatgttttctctggagatgttatacttcaaaaaaaaaggaggaactgtgcttccttgacatttatgacacaggtggatgtgagtcttctccccctgccggggttctggtgccgggatgtgaggggcagggcatgtgcagaaagcagtggcccccatcatttgtccagcgctggctgatggaggcccactgggtgtgcactagggtaagtggatttatgaatagtatcgagttctaactcaacccatgctcatggactaaaccaagcagctttaacacagccctgcaaggaaaccgcagcctggagaccttcctcaccacgcaagccttgagcagtgtggggctgacacacattcctcacaggccgcggctatcaccagccacagtcagaggctcaaaaccaaacaaaaacttatgatccgatcacatctggaagatgtcagccccaaacgtgtgaagttaccaagatgactttttgaacgtatatctatgcattccactgcattgtcattaaagacaaatctcactgggcacggtggctcacgcctgtaatcccagcactttgggaggccgaggtgggtggatcacctgaggtcgggagttcatgacccctgactaacatggagaaacctaatctctactaaaaatacaaaattagccaggcgtggtagtgcatgcctgtaatcccagctactcggggggctgaagcaggagaatcgcttgaacccgggtggcagaggttgcagtgagccgagatcgtgctattgcactccagcctgggcaataagagcaaaactccgtctcaaaaaaaaaaaaaaaaaaaaaaaaaaaaaaaaaaaaaaaaaaaccaaatctccccaagtgtcttctttaagtatttatttaccagtggagggttcagagcagcagtaaatacatttataaacatatgaatatttttatactaagggtgcatgccagaaattctcttctctccgtggtgtacatgagcacagagttcagagcgcaaccatgcaggagaacttacggatctggctccgaattctaaattaggacaagatgcaattgctgagcacctcagctgcagaaggggcctcatctggcctcaggaggcttctgagagttcctgttcttggccaccttgcacctgcttgctcagagcttcctgggcatgtgggtgtgtcatgtgtcttgggagaatcacctgattccccttcctgggctcagcagcctcagtgcttctcctgctgctgggaagccccgccctcttgtcaggtgtcaggtgtcaatcaggattccatctgggaaaaaacccatgcgataagggattttttattgggcttaaaaccttacacggtgtgggagaagctgaggaggtaagatttggagaggtcagaaggtcagagaaaagtcgcaaacaggatggctgagtggacgtggtagagaaatgcctggatgctgtggccctgctgcacgtggtgtacctcggggcagggcagagagctggggagggatgctggaagcacaatgggggaagcaaggacccccagacccacgaggatgggacagacccagcatctgccttgcacacatcagtgatgacctgcaagtgaagctggcaggaggtggaggagctgtgggcggtactggtgagcccgcagggcaggcaggtgtcctgagctgttccagtgccccgggtgtgcactcacctcacagatgcagaggccactgcctcatgtttctttctaaatatcatgtccccctcattgccaaccctgacccagacctgtatgggcaagacatgtctttcatcctagctgaattgacacattgcaaaactatcccagagtccaaaacagagactcaatatggtagagacccctatctccatttctttagttctggtgtggttgaatattgcaaacgcactcggatgaacttagcattgacttttggatggcgttttgagaaattgcatttatagcagcaatggcttgggattttttttgttcatgactgtattgcgtcccttcttttacttggcaggtacgttcgtcatttttttttcattttgagatctacacacttaaatcctttgatttctgcatcattaataacacttcctcaggtcctaatgaaaggcgtcttgcctctctcagcatccgagcaagcagttctaagtggatggtcccgtcgcaatcaggccaagcttcttcagtggcttctaaagcctttcctcgcctggcctctggcggcatcctcagcctcataccttgtcactccctgtgcgcacacatgcaggctgtgcacatgctcctgtacacaggcacatgcccacacctacaaatgaacacgtgtgcatgggcatgtgcacacagcacacatatattcacacacacagtatccacacactctcatatccacacactcatatatacatacacatccacacacagcacacacgtatacacacgtatacacacatatacacacatagcacacatgtatccacacacagcacacatgtatacacacatatccacacatatgtatccacacatagcacacatgtatccacacgcatccacacacagcacacatgtatatacacatatccacatgtatccacacacatatatccacacacatccacatacaacacacatgtatccaaacacactcatatccacacacatccacatacaacacacatgtatccaaacacactcatatccacacacatatccacaaacatgtatccacacacatatccacacacagcacacatgtatccacacacagcacacccttatacacatgtatccccatacagcacacatgtatatatgcatatccacacatagcacacacatacatgtgtccacacacagcacacacatattcacagacgcacaggccctgtagaccctccactgcagccactgatgtggtcctcccatggcccttgtctcctcctgggtctctatagaggccactcctaggccagggatgtcccctgtcacccactcttcccctgttttcactctggccagctccagctcatcaccctccagatttcagcttcagtccctctcttttgaccgtgtctccctgactcccattgtttagggagagtgtcatcctgacacaggcctcagtcatccctgtgctgtgggcatttgccccgcctgtttcccatccagtgccccccacagagcaaggcttggaatccacttctggctgtgacagcacagtgccccacatgctcttgaagatgggaaaggcataagcctgtgccgcgtggtccatccggagccaaatttaaaaaactggacccaccacgtgcagctttgtgggcctcacgcagaggaggagcctacagcctcctagccggtgctggctcgtccaggaaaggttgctgagccccagctctgtgccaggcataggtggaccaggagcagcaggtcactgctctggtgaaggatccccaagaccgcctgtgtggctccgcgagcgccttgaatcacagctcaggaccgtgggccccatggtgcagagctgcctgcagagctaggtccagcccggcccagaggcatggccaaccctcaccctgagcagggcgggcaccacagaaggctccgggaacaggagcagggagggaggcggccaggaccggagagcagtggcaccctgaacctggagccaccctcgacactaggacgttcagtgtggaagcgagccggccaagggagagccaggacagaggcagcggtggaggggcgggccttcagggtgggacagctgggactggctcctgtctgaaaggggggctggggaggtgaaggaaaccccatgtctccagcctggacccctgagcaggacgtgggctctgaggtcgagcctaggagaaggacagtgggcagggcagacgctgctgtgattatccgtgagataaggcacagagcacatcccgcaggaggggcagagcccagggaaaacagggcggcagcgcacagaaacccgggtgacggcgcagcctggacaggacattctcgagggccctgcccagggcaggatggccaattgcaggacattctcaaaggccccgcccagggcagaatggccaattgcaggacgttctcgagggccccgcccagggcaggatggccaattgcaggacattctcaaaggccccgcccagggcaggatggccaattgcagtacattctcaaaggccccgcccagggcagaatggccaattgcaggacgttctcgagggccccgcccagggcaggatggccaattgcaggaggtgctgatgtcctcagatcatctgaaaactgaggcatgtgatcttgtgtttcttaagtcagggcagttcacatgcaacaaatagttaccaaggctgacctctctggtgagaccacggggagatttgactccttactaactcattgcagttaaaaaatatattaagaggtattaattttatgaaaaaagcaataaaagaaatagaagaggccagaagagtatgtgatgtattcaatgggggtttctagttgttttgtttctttttcatctgagagttaaaggaatcatctcattttttgacgcagccaggtgctttaatctagctgataaaaattttgcttggaaaaacactctggcttaatatattaaggatgggaaatataggaagatgcaggtacctataatgaataatgctcacacctgaaaaatgccgtgtctaactcataggcactgcattcgggtggctccagtacagcaaggacatcatgtgggtggagggtgtgtggcaagggataggggtgtcctgtgtggagggctgtaggtagactctgggtgacttgctcagttctgagcttcagcaactgcagaagacggtctgcctgtttgctaatcccttccccgtcacctgcctttccgctgtatgtgtgagtgactcatagctcccaattatgattgtcacggaaattctgcatcagaatatggttgtgcagtgcaggcttggccattcccaattttttgagattgcagcattgccttcttatcaaagtgacctgagctgttgacaccagcgaaggtggagggagggctttggccccgcaaattcctgcagggaatcgaggcagaagcatggatgctttcttcatagaccttgtcttgggagtagggtatatgcagaagtgtgttcagatgtcgaggatttcaaaatgaagatgttcttctagataaaaatcttggcttatggcctattgtgttaaaccagctgtatagtcctgggctaattgttagtaattttttgtgattgggtactgtgttccaggcaagtgatgtttctctttagtaatgttcatgtcactcatttatgactgaagtgagagttgtatgtacaacagcagctccaagactaactagggaggagaaaaatcaggaaagtaaatacatcacaggctgacatctttggaacaaataattaagacaaccttgaacccagttgcacagcttcctgccgcatttgcagagaccgttgagcccttcctcacggttccacattcccagcgttgcagagaggacctgtgccctgtgtgtgcagggagctgaccctgctctgacctttactgtctcttttgcacagcctgcctgattgggaacccctggcccatttctccgtgggccaaggtggaagatgatgtgtctcttctcccagcacaggcactgccaaaggccagaggcattagcaatttttctgcaggggtttttagaggctgtggcatgaaatcagaacgtcgtcttccctgattctggatctgtgtgccatcctgcattcatcaaaactgtttcccaactgagaggctttttttttctttttttggaccacctggcagctccagcctatctagcatcatctttcatccctgcactgtctacctcctgacatattattttgcacatttccaagctgctccttccagtttcctgagcaggattctctacttggaacttctggggtgtgcagcctatactctgtcttctgcctggaatgccagctccagacccccaatttcgtgacaggcaaatgtctacccacgcattatttgtctctgtgcaagcagttgtctccccacccttccctcactgcaggcaggcagtgcatacctagctccaaggacctccagttaccatatggtagagtggctggtatccaaccaagtcaccgagaatcaaatgctgtattagataggacagaggcggggagagaaggaggaaggcaggagaaagagagggaaagactttgatagcatcagaaaacaaccaaaccagctggagaagtcaaaatcccagagaaaagagaactactgaggagtgaatgaagatggtgcatggtattcccccagaccttgctcactcctaggtcgcaccctttccgagtcatagacagagacccccagcaggaagcagctgctgaaaagtggggccaggtaggaattccttctgcttctgggattcttaacttgggacggtgagttcattcaaagcctatctaaaggcaaaaatcagacactaccaagtgtcgacagaaacatgcagcacctggaatcctgacatacagcaggtggtgtgggaactagtctgtcttttgggagaatcattgcttctaaagctgaatatatgcatatcctatgccccagaaattctactcatggatgtctccctaacagggatacagagattctactcgtggatgtctccctaacagatgtgtgtgcaccagaagacaaacacaagaatgtttacggcaacatcatttgttatgtccccaagccagaaagcatctggcttaatgggtggtagattcatcaattggacaaggagtagaataggagaaagacactgtgggcaattcatactcctagcatggaatactatgcagtgttcaataagaacaaaccactgccctttaccacgcggaccacaggtgtgctgatgataggaggcagagtggaaggtgccgggatgggcgtccaggacttctgtggtccatgtgatgttctcttctcgatctggatgctggtaacatggtgtgtttgtcactttgaaaatccatctggccatgcatcatgattttatcatatgtatatgtatactttaatatagattttaactaagtcgatggggagagagagatagtgagagagagtgagcgagagcaggcgagctttccagctatgttccagggaaaattgtgcacagactgagagccatttctcccatgttcacagtgcatatgtctccctctgccccttctatagaggttagtaattgtattgtattagtttgccttagttatctaactatattgtattagtccagaacctactttctagactatagaaagatgttaacgaagatgacggtaacttatgttaccgtcataagttacgatagcttacctatgacggtaagcttatataatgacagcttatatttaaatgctcacttttctcagatactgttctaagtgctcagtaaaaattaagtcattttatctttataaccaacccttgaggtagggaccacctttatatccatctcacagatcagacacatttgaaacttcgaaaatttattcaacgtacctaaatccatgcagctggtgaaaggcagaggcagcatcccacattcagcaggcagcctccagagcctacacatgccctggccatcaggctctttttcctagcctagtgattaggttccagtttatagcaaatcgtatgccagatactatagagagcgcaacacccagtgaggtctctcatctctgtatctccagtacagggcagcaaattaatgcctggtgtgtgttgaataaatggataggtagatgggtgggtgtgtgagtggatggatggatgggtggatggataggtggacagatgggtgggtgggtggatagatggatggattggtgggtgggtggatgtgtgggtggatagatgggtgggtatctggatggatgggtgggtggatggatgggtggatagatgggtggatggatgggtggatagatgggtggatgggtgcatgaatagatggatggatggataggtgtgtggatggatggatggatggatggatggatgggtgggtggaaagatggataggtagatggttgggtggatggatgagtgaatggatagatgggtggatgggtgggtaggattttcaaaaagcgctacatctgtagccttcctctggctggatctgcaggtaaggaattccctgagaaaggcgtcaaaatttcaggcatatttgtgtgccgagcatggcttggagccatgcttctcacctggagatgcccttaaaacagattccttggcccagccgcagagattctgagtcagcagatttcccatggatctggacaccctgaatttccagcaagctcccaggggatgcccctatacttatctgtggaccacaacagagaggcaaagacataaagctctccagtgcctttggtgccatctctcttgcaacaacagtcagtaatgtttcccttaaccctctgttaattggactaagcagagataatgaaagaatgatttttagggcatgccttcagggccctgcagagtgggtgtgcgcttgcagagaagggggcgatatgttttttcagcaacctcccccacacctgagtctgcactcagctttgacgcccggctcatcagtgtgccaggcggccttctgcctccaggccatttatagtgcagaagcttgtgaagccaaaacagtttgatgtgtaattgcaggaggaaatgggaaacctgctgagcgtggcaggatatagtgccttatcaccctttatgtgcagccactgcttgctggaattgccagcagatccacaccatcgacagaacggtgacatttttcatgggccgccgtgttctgaatcaacactgcaatggtgcgattagaggaggtaaaggaaggaaacaatcccagcctcgccggtgacagatcagtcgccagtcctgcttccctccttattacctgctgtcttgtgtgatatgcaaagcagctgctccacacgcattacaccttcacattaaccgaaaattgaattttatttggtagcctgcatatcatttataatactcctcccatacacttcagctctcatttggctaaaagtgtattctttacttcctactggccaagaaacagagaaaggagcctgtgtgtccattggtgcctgcagcccccaggcttcagggttcctgtggaacagggtgtcatcggcaagaattgaaaagcatttccctgtctccaaaatgccccagacgcctccttcccgaggggccacatgctgccatcagcctcgatccagagactgtgttgctgtgtgtttctttgcttggctgtagcatgctggctctgtgtatgcaaagaaacacagcgcagcacgcacagatccacccaaggaattcccactccaggggaagcacgtgggtagaggatcaggtggattttaactttaaaacttatcataatagttatcttctaaaaagcaaacaagacaaaaccctgcctctccccactatttcaaatcttaaattactatgcaaggaagttttatttgtcaaatcttggctactgaagttccagcgtaggagaaaatcttgcttggccaaaattactctcttttttttgttggttttttttttttttttttgagacagggtcttgctatgttgcccaggctggagtgtagttttgcaatcatggctcactgcagcctcgacctcccagtttcaagtgatcctcccacctcagcctcctgagtagctggtactacgagtgcatgccaccacgcctgggtaatttttgtattttttgtagagacagggtttcaccatgttgcccaggctggtctcaaactcctggactcaagtgatccacctgccttggtctcctaaaatgttgggactataggagtgaacagccatgcctggccaaagttactctttttaatcaaggttttaagtgtacactttcatgaattttgacatatgaaaacatgaaaccaccaccataatcaaggtagggcatttccattcctcccaaaagttcactttgccccttggacagtctctcctcccctcccccatcccctggcaaccggcttatggaacccatcattaagaccagctggcatcttctgcagttttatgtaaatggggtagtagggaatatacttttttgtgccggcttcttgcaccgatacatggatgtcagcttgatgacttgagctctgtccgcgtcattgtgcgtgtgtgccccttctaatgccaagcagcactccagttatggagcacacattctctgtatccgttccccttctgatgtgcactctgagctgtttctttgtttttgtactgtgaataaagctgctgtccacattcttatatgagtcctttatggttccacctacctggggtaaatgctatgaagggagtagctaggctatatagtagagaagtgtttaactttttaagaagttgctcagtagccttccaaagtggttgaaccattttacattctcacaaacagtgtgtgtggctccagttcctccacatcctaagccacactcagtgaggtcagttctttaaattatggccattctagtgagtggggcttcattctaatctcgctgtagtttaattttcacttccctggatactgacaatattaggcatattttcacgttctccttgatcatctcatgcatcttcttttgtggagtgtctgtttccatcatttaaccattattcaattgtatatcttcttcttgttgggttgtaaacgtttgtttatatattctagatataatttttgccagatatacacagcatattgaaagtgcatgtgtgtatgtatgtatatgtatgtgtgtgtatatatatatatttcaatatacatatttgccattctgtagtttgtttcttgggagtgttttcaaagagcaaaagttataacttggatagaaaccagcatatcaagtttttccttttgtggttcatacttcccatgttctatctataggaaaacttttcctacctcaaagtcacctcatgttttctcctatgttttcttctgtaccctttctagttctacatttaaatccatgattttttttttttttttttttttggagacagagtcttgctctgttgcccaggctagagtgcaatggtgtgatctcggatcactgcagcctctgcctcccgggttccagcaattctcctgcctcagcctcccgggtacctgggattacaggcacgtgccaccacgcctggctaatttttgtattttcagtagagatggggttttaccatgttggccaggctggtctcaaactcctgacctcaggtgatccgcctgccttggcctcccaaagtgctaggattaaaggcatgagccacaacacccagcctatgatggattctgagttaatttatgtttgatgtgcgtgaagggtcaatgttcttctgttttttaaattttttccgtatggttatccaattgttggtgcaccatttgttcaaaagagttcctttccctgtgaaattacctcggcggttttgtcgggtatcaatcagccgtctgtgtgtggccctgcctcctgtcaccctgctctgacgccttccttctgtcgacaccaccctgtcttgattcctgtgcgtttcaagtgaatcttgaaatctggtagcgtcagccattcgactttactccttccaaaattgctttggctcttctaggtcatttgcattttcctatgaattttagaatccacttgtcatgtaaaaaaaaaaaacctgctagaattttgactgggattgtcaaaatcactctcaaaaatcactgaagttgactctgaaatgcagcatgcaagggtttgggtgtgcaacttgtacgtgagttctagtgcacaaaagaaagtgagagccagcaagccgggctagaggggataaaggagagagtggtggcgcatgtgcccaggctcccgtcggtccctgagagctttcctttccctagagtgaccacagggtgggtaggaggttccctaggatccctggagggtgtgtccctttattaataatgataaagggtgtgatgtagactccttaaccttactacatgtgaaaagagtgtttattgctgaaaggattaaataagataagacgctgagtagttgagctgcaaatgcttgtggattgaagtctaaagccagcttacatagacccacccacctgcccatttcctgccgtggcctcctgtgtcccagccaccaccatcgtcccatggcgcatggctgacgtgctgtcctgcaaagggccaggcgttaccctctagcatgtaccactctccactggcttcgttcttggggctcatgatacatattatttggttacttccaccttggagtatcacaggtcaaatcagccagtaactcgtggaactaacccacgagtggtgtttacccctggataatggcccagtggaggggctggcctgcagctcacacccaccatggttttgctgaatggtgctcgttagactttgcataatcgaatttagcccagctctatgaaggctctgcacaagctagtcccctctctccgctatttgatggaataatagatccataggagaattcatttgcaactctaagccccgagttaaagacgtctcaagggatgaacgtgggtgatttgtggaacactgcgatgcatttatgagatagattgcacgttcaccgcggcgctcaaagaaaccagatcgggttgcattagaggcggtgctgtaatccggctgtcctctgggaaagaatgcaagcttccagtgtgcgaagtatgaggggctgcagaggaaattgctttggtggctctggtcctgggagcaagtacctgcttctcgttcatttaagcacattagcgagcttcataaacacttaagtggctcacgagatgcttcacttccaggcctcgccccacctcctccgctgtcacacagaggccaccagaaaccacggtcttctgggtttgacagccaggcagacaggaccaggccaggctgcagctgctaacccctgcgctggcaacttccagaccccctgcacaatgtcaccgtccagtcattcctccctgggctgcctgccttcatggggcccctgcaattaaaaaaaacaacaacttattctcactcctttcttttaatatgtcttattaataactgtgtaaatttgtttactttttaggactccatcatgatgtaaagtagataaaacaaccaatttgtctttctttttcttggtacatgggtgtcctgcagccttcattccttccaacccccgcttcacgttcacgagtatgaagttgaattaactcatgctttgctgaagccggattgtgagattgtgtaggcagacgtggcttttcttctgagcctgcaaagcagcagaattcatgacaatgggttccgtagtaacagggactgactgcgccatgctgtctctgtccatccttacagcgctcaggagtttgcatgccattactgggaccattttacagaaaacagaggctcccaggggcaacgtaacctgccccaggacaggcagccacaaggcagagaaaggagggttggacctgcacctgtgaaaccacagccctggggcatggcttctgagactcatagctggggctgaagatccctaggggggctctgctgggctcactgctctccagagtggtccagcccggctgcagggtgctgcttccagcttggtgcactgcggccggaggaggtggaggatggaaagtaagattcaaagacagggagtgcaaggggacagtgatacttgaggactccgaggaggaagtaggagaatcatccggaatggccagcctgggccgagcctgggccaacacctgggttgagcccagcccacagagcggctcccgggtccttgcacctgcaggaggccagagctgcttttaccttcaaatgttagatgaggtgccagcacctggacaggagacgtcctgcagtcagctcacagacatgagggtgtcgactccccagtacccttcctggagacgcagaagtcagggttttaaagtgggggtaaagacaccagctgcctcatgtgggtgtggggagcatcctgttggcccatgtgctggggaggggctccaggactctggccacatgtgttctgtgaccttccaggccagtgtggcctggccctgccccacctcccctcgccttctccagtctggccacacttgccttctcccagccccaccacaggacctttgcacatgctcttcctgctgcctggagtgccctttcctaacctggctagccctgctcatgctccagatcccaggtcagctgtcacttcccagtggagctggccctgccctcctcgactaggtcaggacctcctagtctcggcttcaacccccaccttgggctcaccttgctcctctcttaagcaccatcatgatcactcttgcaccttcgcccccaactgcatggattccatttcaaccccactggccagacaccaactgggtatcctgcaattcacttctgacactgtctagcagaggcagctcagaccccacaggttaaggacaaaagtctccaaaagactacccccacttcagatgcaagccacaagtcccgggggaccttggctacaaattctggagttcccacaacatgctcagaatggataactcactggaatgactcacagaactcagttacctctaattgtgctttcattataaaggaaacagaacgcatagggtgaggtctgggaggggcagaatttccatccctctgtcatggagtcagcaggggtcagcaggggtctccttccagcacatccatctgtccaccagcacaaagctctgctgagcttcagtgtccaggatttttattgtgttttgttatgtagatatgattaattaacacattggcctcacgattgaactcagtctccaacacccccccacccccatctggaggtcaggctagctccaagtccccaactctctggtcctgtgcctggtctttctggcgaccagcctccccatcctaaaaccacccaggggccaacagtgagtcacttcattagcataacaaagacactccaatctctcaggaaattccaagggtttttagatgctccataccagggcccaaggacaaaggcctcttgtctgctctgcctgcagcaagctcagaaaggcaaggcctggcctgttttgccccctcctgcgtcctagcacccagcgcagggcctgggacatggtgggaactcaccaaatgctgatatttgaaggaggcagtcagtcagcctgaaggtggcagggcctacagaagacttgcaaggagaccgtagaaaggaaaatgcgtctgtctttgaagagcagcaggaagggctcagaggtgccctgctgggcccccgccccccttgtcttgcctttctcaactgcttttcaaccagagaaatgactcgtctagcaagatcctaggcccttagtagagagctgtttatttgccttgatgcacatttctttttcctttatggtatatgttattttcctctggcaagatccctgttttctttggaacggtgcttaaaatgatagcatttagccgacgaaatagcagcccatcttctgtctccctgtgacgcagcaaaaacgcggtgactagccaaaatgcctcgcttccttttcgttggcacagcaagtccttgtgccgagcactgattgctaaataaggtatctgggctccagtcacttcatcctaagagcagttgtaatcagagtttcagcagcacacaccgccctctcagggagggagatgctggctgggccgtcttttacaaatggatcgtcagtgtgttcgggtaataaggaaacgagagggtttttcttttcctcccaagtgccactgtgcatggcggcttctctcatggaatctgggtccattgtactccacttaaaaggacttaggtcgctggggaccctttcatgactgccctgatgcagacggtcccgttttgttgacacactccacacgacggttaggaaaattccatggggcctccagatgtgcccctggaaaacagaagacattctgatgatgccagaaagactggtccttttccatccatccaggaatcgggaaacgttttctactaagggccagtaggcttttcagcttcatgggccggatgtccatcagaaccactcagctccaccacttcagcaggaagacagccgcggacagcacttaatgacccgtccagactccaacaacgttttattttcacaaacagtgcatgccaggtttgcccagtgggctatcgtctgccaccctgaaccctgctacaattctgattcaggtgtcccaaattaggcaaaatgcaccttgcatttccctgacttatgggtcaaatttttccagtgatgcctttaattcaaggacaagtatcttgagaaaatgtattgttttttaaaaaaaattatactaccatagaaataaataaactcaccaggatgaaagcacagcttccatgaagaattcacattatatactatgaaaatctataccccgtgcaatttgagtgtgttttttctaaagaagctggggaaatctttctgtgagtttcagttttatagtgtgtgttttgttctccttgagaggacctcgtaaatcagttggacacgttttgctataaaagaaatattttatgtgtgaaatgctgtcttcaagacttttctcttttatcaggggtttgtaaaagtagaaaatggcatgtgggtataattggttggccatagtccttaactgtagatgtcatatatctctgctaatgcaaaatttatttgcatgtcagaactttatttgagtggataagggcagaaggaagctgctctgaaaacatttcatatgaaaaggcatattctgtacttccaaaaaaaatattggtcaaaactttgccatcctgtgttagtagggtgctaaagtccactaactacccacagaaaacatcccagcagtgtccagaaagagaaccttggcaaaagtaaatcctgccatgttattaaatcaataagattcccaaaatcagtggaaggaagctcaattcattttcaatgcccccagacaaatagtaaaaattagctaaaaaaaaaaaaccaaaaaccttaacttacctaaaaacatgaagatcataaaatttcattcttatttacacaatgaaaacacattgggtaaagcttttcaacgcctctttcatttttccccccaagcctagcatctgccttcggtgttgactcttctgactgaatatatttttaacttttaaaagacttgtcttttaactgaaaaatagtttgattttttgtcaaaatggtcaaaacaatcttggtgcttgaagttgtgttatttgaagattcaggcctgtcttaaaagcgagagcccaagaagggtgttgcggtgtgcgttttggttgtgctgcagtgtgcgtttcggttgtactgcagtgtgcatttcggttgtacagtgtgacaaaacaaacccctcaaagctcagaggcgtcaaacagctgctccgtggctctgagggttggctgggctcagctggcctgtccggacttggagtttctcatgcacctgcactcagtggggttaaggctggcatcatcccaagccatgaccagccagggcatgcaagatggcacatgtatgtggctagtagtggacgctggtcaccagcttggagatatgctggcagcaaagactggacatggttcagccttctgatggcatagggactaggttctgagagcagatgtccccacagggagcattccaagagtcctctgtggaaaccagaaggctcctgtgacccagctgtggaaggcgggaacatctcttctgcaggactgtatgagtcagacagtcactggccagtccaggttcaagggctgggcataagcccctccctctgatgggcagtccagcatgcaaatacagaggggtaggattcgaggcgcctctttggagaccatcaccctcagcactagaggggactagcggggagggctgcccacatcctaactctttgtatcgccctagttacatggtgatattggggaaaaaaggcattcttgtacagaccactcctaaattgaattcccactctaacatgcctcactgctcatcactgagatccatctctgcctaatacactcaggtcatcacggcttgatcttagctgattgttttatattgcaactgtcctatccataaagcctcagtgcaatggagttggttgcaaagtgaaagtgcaagaaatgcaaacatgcaggatttcatgaagatgcctgcgctatcttcatcatgaagatgaaactgctatcaagaaagtgcaggaattgcagccacaattattgagaaaggaggtggagttcaaccagataaccactgaggaggcagagatccagttagcccatgagagtagaagacacttactgaagtgatgaatgattcagagaacaccttcaggatattagtaacattctagactcgtttttgcaaagatcactctttgcaatggggctctgaaaggcaaatgtaaagggaacaccctgttgagcagccacaatgcttgttagccgcaacaagtcaagtaggacgcagtcactgcttgcatgtctttcaccctaaaagttagcatttagttgcagttataagcaaagttttattaaatacaaaataaaatacatctatttttgcaaaattttagttttgttttttggatatgaagtgctaagcaaatactcggtttgcactcttgactataaaatttcaaccctggttttcagtggattcctgttgaagcctttctgacagtatggattgtccttcagaacaaagacctcctgagatgtgaatccggggaaccagggctgcaatgcctgctttcttctcggcccgtggcgggcgccatggaggaagcgctattgttggtgtcctcagcaggtgtcccgatgcctctggttgtcatggcgcttctctgagacaggcacagcatggggagaagttctggcaatcacatcaggtgtctaaatgccactgccctcgcggtggtaagttctggaagtctgtagttgtcgggaagagcccaggtcagcaaatcggcaggcagattgctcagaaaagtgtcaaaacagtcagactttggatctgagccggaagtttcttttgagttcagatatcacttcaaaaacattttctgtgtccagcttcagtcttggggtgaaaaagacacatttctttatccatttcagagcagagatgacttctttgagttccaagcgtgtgctatgtggcgagctttcccacaggtcacgcagaatctcagacttgaaacacagcgtccaacaccggccctgctgtcatccatccatggcaggagccaaactgtccattctcttggaagagtaacaagagaaaggactaaatttcagaatcaggggtttcagaaggaaaggaagcggaaggagcatccaggtcagccccttggcttcagaaaggacttaggcagagggactgggccagggcctcacagctagttggggcagagctgggcaggcttctgggctctgctcgctcatcgatgacactggttatacccactccaggtgggagaaaagacccctttccccactgccatttaaccactgtttgatcctgctgtgttctgaatgtctgtgtccctccagaattcatctgctgaaacctaactccaaggcgatggtgttagaaggcagggcctttgggtggttatgaggtcatgaggactctgccctcaggaatgggattagagcctttataaaagggactccagagagctgcctggcccgtcttccatgtgagcacacatagaaagtaccatttaggagaaaacatgccctcaatagacaccaaatctgctgacaccttcatcttgggctttccaagctccagagctgtgagcaataaatttccatggctcataaatgacccagtctaagctcttctgtgatggcagccctatcagactacgacaggaccctaacaacaagaagagccaggttgggttgtgcaggtggcacggcacgttcatccaggttctctccaacccttctttactaacaggacatagcttcagaaaaacttgagccctgctgaggtggaaactcttgcagatttcaaatccaatcgtttgtatcagcatattcttctgaaggacagtgatgagcacgaatgtgacccacacttgaagaccacccagacgcaaatgccccagcagcttccagagacagttattactgttttaagtgcatctatttagcatgatggatttgatcagtctttgctaaattgagcacataagcgaggatgtatttaaaggagtgttagtgcactttttataaatcccaaacgcagggcaagctggctcatgccactgttgaaaagcagtgtgtgtccgaggaagggccgcatcacaccgggtgtggatggaaccatgcctccctgacgtgcagaccctccgaatactccacttgcagaacctgtttttaaacaaacatcattattatcaggtcagtgaaacatccccatatcgcttatgctcatcatctgctgtgcaaatatttgtggctttaaaagaataacagatcgtgagaactccagtaaaatgattgcagaactaaccacccttttaagtagaagtgacatttctaacaggcccactcagacggttccagccttcgctttggggttctacattaaactccacttaggctgcctgcagtgaggggcagaaggctgcgttacagagactcaaaggcaaaacgtggggtgcttgcctgcacccagtggagcctcatccacgatcagtgacttccagagacaggcaagggtgtcaggaggctcccgggatgcactgaagcagctccttttaggaaacaagcggcaaagaagaattttaaccctctttatgctgataaaaaaatacacacgtgtgggaatgcatgtcttgggtttgagcactgatcctttttctgcagtcccccggccttggcactgttggcctcaggggctgaatcaccccatggtgggggctgccttgtgcattgaaggttgtttaacagtgtccctggccgccaccctttagatgacccctaggtgcaccccttcttccttcctccacccccaggtatgtgaatcacaatgtctttagacgttgccagtgtgtcttggagaccaaagcaacccctgattgagaaccgctgcctaggaagacacacttttcatttgtttgttgttttttaatgtaatctatagttgagagacaccctgccccacctaggtgtgaagcacctcgctttacctggaaggctgggcatatttaaataccactcccctgcacgcttatttgtcgcagagtggttaatgctctttaattggtgcagtaaatattccagagtcttccttgttatgccggagtcatttagaaatcagccctgaaatgtggctgctattttagggatcatcacacatcatctgctgtttggtgttaaaccctgagccgctgttatttaacactgattaataaatggcaggttgtcagtaccggcagtgaagacacttcaaggagccattgttcttttaaattaaaacatttaaacatttaaatccagggctggttctcatggctcgttttaattattccttttgtcttggcatacctttcttctcctgatcacacagctgtcacgccagcagtacctggagtcggaacacgacagccctttccctattagctgccattattttcgcaaggaaagctggaagctgctggagcagatgttaattttgagagaagactgctggctaagttattaaaatgagcgcatccgaaggctgcgactcatatgatttatacgcgggcagggcctgcaggaccgggtcttgcttggctctgtatgtgtgtgtgtgtgtggatctgtgtatgtgtgtctctctgtgtggtgtgtctgtgtatctgtctgtctctgtgtgtgtgattgtgtgtatctctctatgtgtctatatctctgtgtgtctgtgtatgtgtctgtgtgtgtgtatgtctgtatctctgtgtgtgtgtctttgtggatatctgtgtgtgtgtctgtgtgtgtatctgtgtgtgtgattgtgcgtatctgtatatgtgtctatatctgtgtgtgtctgtatctatgtgtgtgtatctttgtggatatctctggttgtctgtgtgtgtgtctgtgtgtgtatctgtctgtgtgattctgtgtgtgattgtgtgtatctctatatgtgtctctgtatgtctgtgtgtgtatgtctgtatctatgtgtgtgtgtctttgtggatctctctatgtgggtgtctgtgtatctgtatatggctgtgtctctctttgtgtattttgtgtgtgttcatgtgtatctatgtgtgtgtgtgtatgtgtatgtatgtgtgggtttctttgtgtatgtatttttgtgtatctgcacgtgtgtttctctgtgtgtgtctgtgtatatttttgtgtttctgcatgtgtgtgtctatgtgtgtctgtgtgtgtatttgtgtgtatctgtatatatgtgtatgtgtgtgtgggtttctttgtgtgtgtatttgtgtgtatctgcatgagtgtttctctgtgtgtgtctgtgtatatttgtgtgtttctgcgtgtgtttttgtgtatccgtatgtatgtgtatctttgtgtgtctttgtgtacatctgtgtctgtgtgtatatctgtgtgtatatgtatgtgtgtttctctgtgtgtgtgtatatttgtgtgtttctgcgtgtgtgtttttgtgtatccgtatgtatatctttgtgtgtctttgtatacatctgtgtctgtgtgtatatttgtgtgtatatgtatgtgtgtttctctgtgtgtgtctgtgtatatttgtgtgtttctgcatgtgtgtgtttttgtgtatccgtatgtatgtgtatctttgtgtgtctttgtgtacatctgtgtctgtgtgtatatttgtgtgtatatgtatgtgtgtttctctatgtgtgtctgtgtatatttgtgtgtctgcgtgtgtgtgtctgtgtgtgtctgtatctatttgtgtgtatctgtgtgtatatgtgtgtgggtttctttgcgtgtgtgtttgtatgtatctgcatgtgtgtttctctgtggctgtgtgtatctctgtgtgcgtgcacgcatgtgttgatggagcattttcccttcccatcttggtgcttgctacggggaattcttgtccctagtcttttttctccactcttcccccactccctattgcaagaatcccagcctgaccctggccacctctggccagggattgtattcgaagactgtcaggaagctctggaatcaatggagctgggggaccccagctgaacaatatccaggaaccaagaggcctgtggagagccaggcagggccccggccatccccaggcaggacagcatcagtgctcagagtctgactccgaaggaaaggtccacttggccaagccgaaggcatgagttgttgccccaggtctctccttcaaagtgagtggccatagcaccccatgccaagaccagccacagtgagggccctctgaggcaggcggggcatgggagtgcagatgataggaagggtgggagtgacgaagagctgggcaagaccaatgcccctcaaacctcccctggcttccctccggcccctcctccccctctcccctcccttcctcttccttccttcttccaacaggtcagcaggaggcaaagggaccaaggccattctacttttagttctagagaagcaattttctcaccaacttcagaatacaccgggtttgtgttatatttcacagtgctctcgatttttaaaaaaggaaaaagaagtaaagccatgttgcagcattaaaggtagagacttgcgagacctttcccaggatgtgacgtgctggctggacgccatggtccttcgccctttcctgatttgacatggggagggagggttcccagcccatctgagctagtcctccgcgcagtcctgaaggaggccatctgtgggccagtgcctggcgtcctttcctccagaacgctggccctggagcctcccatgcccgctggtggatagcagttggttacagtgtagcacacatggcagtgaaactgaaaccacaaggaaactgtgggtgcgcagttgatttagaagtgatgattcctaggtccactttaagaaagaccatgaaaaatgaaatcagagatcaaatgtgtgggtcatacttgggaagggtgtgttttactaagatgaccttggaaccagactggactagcagtcactaagcagtgtcagccagagataatcatgtaaaatacatttattagaccaaggcctactgctattttcttataaacttatttctacaagtttgtctcacttttatttatatatctaaaaataagtaggggtgcaaaaatgtacataaatacttgattaattattttgcttacaaaattacttctccaataaaaagattatactttgatcatacccatagtttaagttaaaacaattttaaataagatctagcgtcatacttttaaacaaacagtcttattctattggcatcacttgcactgttccgtgtcatcaaacgttcatagctgcataaacattccatctcatggattatcgttcagctgatccgcctcatcttaaaaagttgggttgcttgcacttttcatgatagaaggtggctgtaaagcgaattcttgtgcatgcgtttttcacacatctctgttcatttccttggggttgactcccaggactgaagaactagaatggttttaaggtttccgcatgtgttgctggtctgcccgaagaaagcccagcccgcttatccattcatgagtttgtgtgtgtctgagcacctgtctcaccttaacccagggtatgtgttggggtggagagtgtgtacaattatatatataccttaataaatatattcagtttggccaatttgttaggggaaaattgttatttacacatttttatatgtcattattagtgaagctgaatttttattgccaattgtttattggtcattagtttttttctttgtaaattagtcatctctttggattttgtgtgtgtttattttaacttacgtttttccctctggagtacatatcttttccagtatgatttggaggaattctttgtatactgtttatttactaacctttttgcctaccatactcattataaatactctctgtgattttgtcttttgggtttattcatggtgttttttgtttgtttgcttgtttgtttttgagacggagtctcactctgtcactcaggctggtgtgcggtggtgcgatctcagctcactgcaacctccgcctcctgggttcaagcaattctcctgccccagcctcccaagtagctgggattacaggcatgcgccaccacgcccagctgattttttttttttttttttttttgtatttttagtagagacagggttttgctatgtaggccaagctgggctcaaactcctgacctcaggtgatctgtccacctcggccttccaaagtgctgaaattacaggcatgagccagtgtgcccgacctattcatggtgttttcgatataaaggctttcctggtatttggaagtcatgcttttcagtcttgtcccatttcactttttaatcattcggggtctcctactttcccctttcccactcagatccattttctctcccctgctcattctacttcctttttttttttttttttttttagcttgagatggtgcatggaaaattttaatacgatgcatgggaagggaggagaagaggtaggagcaagagtagaaaaggaaaaataagacttggatggcgaggacgagaatgtcaccttttgcctgtatcttcaaactctatttttatttgctttttaaaacataatgatgtacaagactttcatttggaaattatatcttcattccataaccctcttttttaccttcctttcatcatattttccaacactttccccagaattctccctcttccttcattttccttcttctcttactttcccaacactctgaagcatgaacttactttttggaggtcatgggcttttcccaagattctgccaccagcatcctgtttgtctttcttgttcgtccctggggctttctatgctgatttccatacctaatcaaggtagaaaagaaccaaaaggatcttaaaagtgggttggcccaggctttgctggtttgtttcagcccagcaggtctttagactccatgctggctggaagccagtgccccaggagacatttgcacttaattccttctgtatcccaggaatcacggacagctgggcaccttgtttttacattctgctgactgtgaagaaggtgcttttatagtttccataagcgatgtttatgaaacaaacctgcactcttccagaccggaaaggtattatgcgaacgttttatgagcagaatgtagaaattaatggagaaaaactactagaaatttgggtcgtttgatgttgtttgctactcgcacccaacagagtacggttaatcatacatcacggcacagcctcctccaatctccttcataatgtgtttttttatttccatttgtgttgggggttttgtaaaatacacacattgtgctctctgggaagataatgggtgtctctgaaaggacaaagcggactctgatttagtcggctctgtgctgtgataggagcaagaggagttttttgtattgcattatcaccattctggtggtagaaaatgacttaaatagacctagcctccgaaatcgtcactgtgttaagccttgttatgatgaacttttcctcgcgtgcacgtgcagttctgtataatgaatatacagataggcacccgcgcatctgaggttttctttttgatactctgaaaaggctattctttctttttttaggccaaacttcgaggttagtgatggggaaatagcaataataataataacaacagcgtgaaaaataaaatcgaaaagccctggcatatttaaattttgattagaagccagctgcagtgtctggattctacagtaggtcaagttaaggggctgctgggtcctgaatattcagactttttctctactttttaaaacctggatccacattaacttctgtcacttcacacacagcctctggggaagcagttggggatgggatggcacctgcccactgtgtgcagtgccaggggctgggtgagggtgttcaggcttcatctttgctgcttcaaggggcactggtgccagccacattagcgttttaacccaagccaaggctgtcctcagaggcccacagcatggtgcatttatctccacgggggggccgagggaccttgaaaccaaggtcagtgtggatggctaggccagctgccattggacccaaggaaaggggaaattaaaaccattcatttacatattcctgattctcatgtttgctcccaagctctgtgcaaaggctagcctccactcttcccggcagctccactccctgagtcactccgctaataaggactatccagcctgccttctagtctctctccgtagcctgtgacgtggggatattttgtaatcagacgtatagtccatcttgcttaaatggtaatttgtacagtctcctaatagtgtatgaagagaaggaggaaaagaaagaattccaacttttattgctttgtaaagatcattttaacagtagtgtatgttgatggtagagaattaaaaaaaaaatggataagacttaagaacttgaaatcaccactgctaatattttgatctacaaataccttttctagcctttatcactaactctacagaagtgaaattataccaaatacttttggttttctcctcaatgtacccgtatactgaggctattattagacttaattttctataccatttttaagagctgcatagattctgtggtattttgtggtacttcatatggtaatttccataaccaagttggaaaatatgctttctttcaattatcctatcatcagatgggtaaaaggcactcacacacactttgcttttgcaaaaccagcgagaactctgtgttcccttttggagcaggtgccgtttgcagcactgctggcctctgcccctgactaatctcaacccttattcagaatggaaacttgagggtatgttaatttctacagtgttgacaatgatgtcattacaatcaaaactatcttagtggattcttttaagtcttcttgaatgaccttctgttcatgaatgtttaacccaagtctggttcagggctgtctctgtatgactcaccttcctgggataatcctccaggacagggccttggtgggaccccagccttcaaacttctggacagttgagactaaagggaaatgatgcttccaagaggggctcaacaggacccacagatccagccttacacacatgcattggcccagccatgcagggaaatagaaacagttctcccaaactgttctccatgcctttttaagtctgttttcacagcagtgggggctgagatgctgtgtgatttgcaccaagccttaacctctaaagatacagtttatttcatctgtgctgggtcttcacttgacagaggatttattaaggaagacttcagatgcgaacggctgctttgatattgaaatatgctttcggttttgcaaatacgtttgaggttctatctatgtctattcctattaaaagctcagttccctcatcattgtcccaaaccgagaaggtgtctgagcttgctgtgataagacaaggacttctcagggcctggatccacagctccaggattcattcagcaaactgctcggtggccactgttgtcaggacactgggttagggcagagagaaccctgctctccaatggagagagtctgctgctgtgctccaagagtggaggtggctagagcggggttttctctgctctaacccagtgtcctgacaacagtggccacccagcagtttgctgaataaatcctggagctgtggacccaggtcctgaggagtccctgtgctatcacagaacaccagatagccatgatgcatctgacacagtccgtttgtgaggaagtccacaaacctggatcataagcctccatagagaggggcctggaggctcaagagagcggagggtgttttgtgggaatagatgctcaccagcttttctgagctttttccctccctctcacgcccccccccttccctccgtgtcatcctgccacctgtgcatgtttcttcaatagagtcttgagtaactctatgatagagagctgtgcctggtgctgcggaagcctgatgggcatgatacttggcacctggcttcaaaaagcggctgcatataaggaggaaacggcacggaccaccatggagcatgtgcgtctcagctgcgtcagagtggttcagagtgcttggcctcacgcagacctggctatgaatctcaggtaggattgttgcttacttgaagccacatcttcaaagcctcagttttgtaatctgcaaaatgggtataataataccgttatatatcttaatcctatttccaagatacaggcaagctaacaggttcaaatgagaaaatgcttctggggcaaagcctgaagtggcagcatttcttcctcttctaccttccaagtaggtcctttgcttactgggtaaagggaagatcgccggagccctgagagtctatgtggacatacctaggagagctggggtcgccaaggaaaactgtagaaggtgggagggaggagggcactaaagagaggagaggggaaggaggaggagggggtaggaggctgggaggaaggcctccagggtggactctggacagggcaggagggctccctggccgtggtgtgccagggatcccagcatacaagcttccatttgtctccaaaagcctgatctgcacaacataaatgaggagggatgtagagacttcccagctcttctcatgcctaggcacttagatgatttagggagaaaccactggaaaattaattatccagataattgcctaacacttaacttcactttataaaatggaaacttgattgtgagtcttgacatccaccccttcagtgtccttcagaaaacggctgtggccccttcctgagaacctggagcattcgcgcttttcctttcatttgtggattgtgacgctggctcagcctgtgcttgggctccactgcagagttgcgcggctggtggaggcttgtgctcaggttgtaataaagcaatagcctttcaccttcccaggccgggcccacaaacaggcaggtggcagacttacatgttgagttccaggtgtctttggaattaatctcgtgtcagaaaattatatgagatgatgcctgatgcctcttgtccataatagatcttagtccctcatttaaggatttccttacactgcttgatagagaagaaaagccagccttaagtagctttatgtagggagcttgatttctgaaaagattgctaatcctagtgggaatttatataaaagcgttcagactctgcagaatagccacgttttcgatatttatcaaatgcagctcttcttgtgtgaataatgcattctggggcaggcttggtaaattgctttagttaatgaatttcaaaggtagagatggttgttgaagcatctcatctggtgagcttgctgtttgagttttgctatttattcagtttttaaatttttccaattgttgaagagttttcccacaccgtacagaagtaaggcagggaaagcaagaggtgtgtgatttggttgattcttcacacttcatctttgtgatgcatttttttttatgtgtaaaggccttgcaggccttgtgattcagacagtaaaaccttgagaaagtggcccctggcaggtggagaagatatgaaataggggagtgagacaaaaacagaaaactgagtgacacttattatgtttctcagcttttccaccatccatttacaccacagccctgggttctaaccagtctgccttcttataataacacacttaataaaaagcatagctggtatttaatcttgtaacttcttagaagttaaactagtgatgtgtcttctcctaagttagcagtatagaaaaagcttctattaagaagcaaataaagaaatgaaaatcaaacttcctgggaagtaattatatgagtttataataagccataagacatttgaaaggaaggggaaaaaagccaatgaaagagtgtattgaggatattaagtaattttaatgtcaccatttgatatccaggaacttgaacaatttatagttcttgaaattgtcaaattgaagcattcatttttctgtcatgggagcagtggcagtgatgggggattatatatctcagcatataagaagaaggaactcgcattgcactttgaagatgcaagttcctgtggggcggcccagcagagacgtcagggctgagcttgctgggttcgcatgtgtggaatcccagccggctgtgaggtcctccaggaagtgacgggacccccctgagcttcttccagtgtcctgtctctcatgggaggaggatgctattaccacccacttcttaggtcctcaggagtaaaggattcagtgtgtggaaaaggctctgtgtggagctgggtccagggtgcgctcaacccataacaaccagagccacagagaaagatggtgccttctgggcagctcacctgcagacaatctgcaggctgtagatttgattctatgtatttaaaaaccaaatacttggcctatctttctttgcggaattataagatataatctgaaagaccaaaaagtgacctgatatggtttggctgtgttcccacccaaatctcatcttgaattgtagttcccataatccccacatgttgtgggagggacccagtgggaggtaattgaatcatgggggcagtgaccctcatgctgttctcctgatagtgagcgagttctcacaagatctgagggttttataaggggcttttccctcttttgctctgcacttcttcctgccgccttgtgaagaaggataggtttgcttccccttctgccatggttgtaagtttcctgaggcctccccagccctgtggaactgtgagtcaattaaacctctttcttttataaattacccagtttcggtagttcttcatagcagtgtgagaacagactaacacatggccatcctggtgacctgtgtgcactctgatgaaattccgcagcatgagtctgcctgtgtgttcactgagttcccttctcccaggccctgggccggctgctgggatacagtggtgaccaaagtggagacagttcctatcctcacggagtttatactcaagacggggagtcagcaaagtaaacaggcagccacaaccatggggtgaactttgttatggggacatgcacctggggggaaggttgtgatgggaggggcacccgggtcaaacacgggcggttgttagtgaagagcccgcaagacagagtaggagtcagggggaacagggagggaggggcatttttttctttcttttttgagacggagtctcactctgtcccccaggctggagtgcagtggcgcgatctcggctcactgcaagctccgcctcccgggttcacgccattctcctgcctcagcctccggagtagctgggactacaggcgcctgccaccatagccagctaattttttgtatttctagtagaaacggggtttcaccgtgtttgccaggatggtctcgatctcctgacctcgtgatccgcccaccttggactcccaaagtgctgagattacaggcatgagccaccgcgccctgctgggaggagcattttaggcaggggagcagtgtatatggtagcctgcaggtcagaggtctgtggcaaacgcaggagcctgtacctggtgttcgttttccccactacggggggcagtggtgcaggagtggtttgaagggtgggttccgtgaccagggtaggaagcatggattttattgcaagcaattgagaaccatttaagtgttttattttctttaacagctttattgagatataattcacataccataaaattcacctttttaatataattcagtggtttctagtttattcagttatgcagccatcaccaccaattcaagcacattttcatcaccccaaaaagttctatgtaatttttcatctcacgtgtagatttgtgtaaccaccacaaccaacatcccagagtgttacatctccacaagcatatactttgtaaagacatcaatatcaagtccaactttgagatacaggaagatgagatggaaagcatatacactgcttggtgatgttcaatatgtaagcactccagaagaaagcacagccacaaggtctatggcttgtccatgaaacctctgtgagggtgacaactgcaaacacccacagcccagggtgggctggcagtgcgagtgcctcaaatcagtgtgcctgtgggttgtgtgattctctgaattggtgaagagctctaggaaatttctgagctgcacaaaggacagcttcccttctgtgcatatggcaatcgcactcctgaaaaattcagtgaaggattttaataaatcccgcaaaaaccaggtgatgtttatatgtaaaacaaaatgaagatctggactcgggtaatcataaacttctaggactagccagcgactagccagccacatgtggagcttcccatgtgccatgcagggtgcattcactgccccggcctgtgcccataagaagctaatggcatccctagacattggaaaaacccaaatgtacctctcacatttccaaactgccccatggggtggtgccacccccatgagagccactgtgcttgactctgagatcctcgaggacgctgtgtatggtccttacatgtcatctgcagcatgggaccaagcaagcatgaaggagccaaacatgcatgcaggtgtggatagatggatatatgggtggatggagaataggatggagagaatgaaggatgggtggatggatggatagatctatggatagatggagagaaggaaggatagaaggatggatggatggatggatagatatatggagggagggagagaaggaaggatagaagggaagaaaggaaggaaggaaagagagagggatggagagaaggaaggaggaatggctggatggttggatggatagatggatggagagtggatggatagataggtaggtgggtggacaggaggactgatggctcttaaataacctctgtctgcaaaaccctcaggaacctgctgcccagcatttgtactgagttcaccatctctacccttcaggcacaatgggcctctccactgctaaatagaatgtgttggcaacatggcgggtgaaatcttaggttggcttttggaagaacattaagttgtttaagaatctgaggttttattgtaggccagtggttctctgctacggctgattttgaccccccagtgggcatttataaatccctagggatatttttagttttcacaaagcaggggagtgtgaactggcatctagttggtagagtccaccctggggataagcaggggtgctgctatacatctctcaatgccagggcagctcccacatcaataaataattcacccacgtggttgaaagtgctggggtcgggaaactctgctgaaggtgaggagctatattatttcttaaaagccattataatgtgcataactgatctttggaacactgaggactgtagaaagatcttgtgcaccttcagaagacaacagacacgggagaggcagctccagagaggagctccgtgaggaagcttcctgaggtgtctttagagcagaaagtgtgttccgtatgttggatgtgtcattagtatgattatatgtgcttatgtgaagacacagctgttctataaatgcagcaaagcttctgagaataataggagaacttctcctgggggtgagtaagttaacatgctgggaatgagaagcttggattcacaatggggtaataaatggaaactcgctgcacaaagaagaattggtgttttaatttgtcagaaaattactgagtggcaaaaggggctttgtgccagacttctcctttcagagcgtgaattttccttaaaagagagcaaacctgtgtttacagcatccacctgaaacagagaaaatgataaggacaaaggacctccgtgaggttcacagacaagccacagtgttgctatcaccacgggggcccttttggagacaaggagcggacaaggtcatggtggtggctgcagtcctgctcttccacttacctgggatgttaccaacatccccagtcactttctctgcccacctctactgtctctgtcactctctaccgtctgtggagcaaaagggtggcttgttggatcctccttcagataactctgttaaaaaagacactaggatagagagagccagagatgtgaacaggatatagagccaccctgagaaattcaactcccaaagcaggtgaaatttggtggtgactgtgatgtgagtgacagtggcagggatgatgacaatggtggtgatagtgatgggggacaggtgacagtgattggtggtggtggcaaagatggtgatagtagtgatgatggtgatgctgatggtcaccatggtgatggtacgatggtcatgatcatgatggtgctgacagtgctggcactggtggtggtgatggtaagatggtcatggtcatgatgatgacagtgctgacactggtggtggtgttgggatggtgatggttatgatggtgatggcagtgctgacactggtggtggcggtggtggtggtagtcttatcatggtgatggccatgatgttgatgacagtgctgatgctggtggtggcggtgatggttatggtcatgatggtgacaacagtgttgacactggtggtggtggtgatggtgatggtatgactgacactagtggtggtgatggtcatggtcatgacggtgatggcagtgctgacactgtggtggtaatagtggtgatggtatagtcatggtcatgatgatgacagtgctgacactggtggtggtgttgggatggtgatggttatgatgttgatggcagtgctgacactggtggtggcagcggtggtggtggtggtggtagtcatatcatggtgatggtcatgatgttgatgacagtgctgatggtggtggtggtggtgatggttatggtcatgatgttgatgacagtgctgatgctggtggtggcggtgatggttatggtcatgatgttgatgacagtgctgatggtggtggcagtgatggttatggtcatgatgttgatgacagtgctgatgctggtggtggtggtgatggtgatggtatgactgacactagtggtggtgatggtcatggtcatgagggtgagggcagtgctgacgctgtggtggtcatggtggtgatggtatggtgatggtcatgatggtgatgacagtgctgacactggtggtcatggtggtgatggtcatggttgtgatggtgatggcagtgctgacactggtagtggtggtggtgctgatggtatggtgatggtcacgatggtgatgacagtgctgacactggtggtggtgatgataatggaggtgatgatagtgatgatggtgataatgatttggatagtcataatggtaatggtaatgactggtgacagtagtggtattggtggtggtgatgatggtgataatggtaatgatagtgatggtgatagtcatgatggtgatgggtgtagtgggggtgatgaagacggtgatgtggtagcagtggtgacaatggtgacagtggtggtagtgatgatgatggtggcagtgatgggacagtagtggtggtggcaatgagtgaagccctggcagagtcagtggaacgatccctcagtcctgctctacctttcagtgaattcacgctctgccccacacacctcatggctctcagctcctcctgcttctcttgttcttcctacatctgagcttctgctatccccacttttttttttttttttccttctggagcctggcaaccttggtccagcctctgagccctggcattgtctattctgtctggaggcttctcatccacacctccccctggctgtctccttttttagtcagtttgcagctcacactgtgccctggagaggccccagtggccccagcatggtctctgccttcatgggctggtgttgcctggtggctgctttagcttctttagggcttgtgtggccatccccttctccagaaggttggtcctgtgggagtatcgctttatcccagtttttggtccatgctggtcaaacacaaagttgccagtgagaaccctgactcagagctttgtgttcacttgtggggttgggtcagtgtttgggtggctgttggatcccagccaggaatgggcatgatggagcaatggtgagaggaccccaaccccggggttcccacctgatcacactgcagttcttcactggtcacgtattggtattgtgtagggagccaggggtgcctgcgccccccaggactccagtgttggccattcaccaagctctcggaggattcccacagcagctgaggccaggaaccagtgcctaggatgggggacgctcacaaccagtgcaagagaagtggcccagggagggatggagagcgggagggacatggtgaggacaccatagatgcgggctgacaaggctgacctgtggtccagggaccctgtcttcaccctgtgaagaacaacacagtgatttatgttttcatgtctcttcctgtggttgtccttaaagtaccaggagttaggccgggatctgggaggcagaaatgattcccccaggctcacatgagcgcttcgcagcccgagttaaggacttctcagaaggcagctccttgaacccacacaccaccccagggcaggaaaagggagacagagcctgtgacccacagaaggtcacaccacagtacctgataaagctccgcaagctgaccccagggccgcaggtacccccacacctgggacctcacactccaggaaccaatggcagagtgatgggttgctgggtgtctcgaggcccaagcagaggctgacagtggggcctgggaccatgcattgtcaatcagtggatattatcccttagtagaaattcaataaatatttgttaaatgaatgtgcaaggtgtaaaactcaaggagaaaggctgttaacagggagcgctttgccctcggctagcacataataaacactgaatagccaggtgcccactgtcggacttttcattggtgcctctgctcccttcctaaggaagggaaacctgcaatcaatatgagcagctcatcctgacagcagaattttgtagcagaaaaaggctgctctgtctctttaaggaatgcaggtatgcccaggtgatctgagggtgagaccagcttctctcagctgggccccagaaaccttgatgcctggcctcattggagaaactggggaggtttggatcccagttttgcccaaccaaaggtgggcagtagggggccccagagcccccggcctcacctgccgctggaagcagcctcattttacaagggtccatgtttggggataagggccttgggccaggaggtggtctgctgaggctgcaaaggccaggccgccctgtccaggtatgcacggaggcgtccctaagtggtgaggtggcacccataggaggaaacatgttgagtgggtgtcctaggaacccttgaggggctgcagacctggctggctgttctgcagagaaggggctcatggtgggaaagggagccgtgtgtgttgaacttggcttcagggtggcagcaggcctctcgagagctgggggcttgagaaggtcatccatgggtgtatctggctcgatgcatggccccagctgttctgtgattgttgctgtgaatgatattactgttattccctggtggctctcttgccagcacgggctctctgctttggctccatcagcccctgttagggcagacccctctccctgggctgccctgtcgacagtatcctgctcccatctaagccgcctgtttccagggccattaccagggagaatttgctgaagaccaggttcctaatacaggacttggttgcatttgtagaaacactgatctaaatttgaacctctaaaatgaatgttggaacctccccttcccccaattttacacaaattattttaaagagaatattgataatctaggaagccatttttttttaaaaaaaatgcaaaatccctaagtctggaatttcaggtgcatcagcaagaaagacagcaaggaagacagccttatgcgttccctgcaattaaaaagggtattaagaaaatcaaagcttcgcagacactgtctcttaattgtcagttgtgcagggttaatgaactgcattagttcactgaaaaataacatattgactgtcagaacctgccacagcagcagtgaggagcctctgtagaatacctttgtaggaaattaaaagtgactcggcttccgctggaaggaagagactgagggggcctgctcagagggttctttctgaatgagtgggttcaagcaagggtgatgtgacttactcctgagtccaggcacggatgcctgggaaatgcaacgggacccacgtgggagtgggaggggaggtggcccgcaacgggggagtgaggggcgattacatttttcctgaactgttactctctggaatttgtgcctgtcctcctgtgttatttccacatttgtgaggttgttcacttaacctgtgcgctgacctggaattgtccccaacggagacgcatgatgtttgcaggggaatctcactgaacaagcaccgtgtctctttacacttgactagcaagtgatgagagagagacattattcagtgctttgctgcccaaagctctggagtgccgtgtgcattcccagggccacatgaagcccagtggcaaagtccatgaaacatgaagatgcccattaaagatggagttgacaaaaggagtcccacttttagtcctcccagatcaggttccagcacagcactcgcgtgcacttaaaattactacacggcagtaaggcttcttgacaagaaagttgtcaagggtggatggtagctggattaatgaataaatccaaaattaacccaggactggaagcactgtggctttgcaaacctggcagatggaatgcatggtaagaagggtatttgaaccgccatctcccagccttgccaaaatcttgttacaggtttgaattttctgcggaagttctgcctttatttcattggagttctcttgaagatgaaggatatcttaagatttcagtggtacaaacccaatgggactggcccttccctatctggggtgacctggtgcattgcatcctccatggggaagaattagtcaaagtagttgtggatcttcagaggtgtggaggagatttgtttatatgcaaacgatttttaatatgattacaatttattctcacctggtaaatcaagggggtgtagtaatcctgaggattcctgcatcatcttctgcctgtaccaaaaataacaaaatatcttaaaaactaagtcatcccataggcttcccaccactcactcagcttgtgcattgctcctgagcctccctcagccccctttgtgctcccagctgctcctccctctctgccatgcctgggaggacactcagctcattggggctcccccctctccctccttccctaggtttcatcctccatccttgtcattggcctgactttttcacaatcccaggtctgaatagatctcgtctttgctggaaatatttttgttgctctgaggaagatttacatcatcctcagtaaaatcctgccagaaaggagggaggtggacagtcagcagcatggggtgggcacctcacccgtcagtcttcaaaggggatgaagcaggagggtaaggatcagagcaggtggtgaaatggtttgactgtgtcctcatctaaatctcaccttgaattgtaataattccccatgtgtcaaggacagaaccaggtggaaataattgaataatgggggtggtttccaccatactgttctcatggcagtgaataagtctcatgaggtctgacggttttttaaatgggagtctccctgcacaaactctctcttgcctgctgccatgtaagatgtgcctttgctctttcttcgtcttcctccgtgattgtgaggcctccccagtcacgtggaactgtgagtccattaaacctcttccctttataaattgcccagtttctggtatgtctttattagcagcattagaacagaataatacaggtgggcaccggggcaggagtaggcaggcaaagccccaaagtaacagcaacaaaggaagaaaatccaggcagatctctacagaggaagagtgctctcaacatcaaaagaccaaagttcaaccaagtgaggtgaggccccatgtacaaaactgatgagacttttcacacaaagatgcctaggactctaacccagcctcaggagtggactcagaatcctgggaatcaggatctgtccacaccatgcatgcttccactgcaccattgtgcagggcactgtggttccccacccaatcagtcaggagtgaagacaatggcttcaaatgtgcataggtgggtcctggaggagagggcggagggtctcatgttgaatcccatcctatgtaagccacagcaccagagctgtaaaagaaaaactgcaccagggcagtcaaatggtccggaaagactttattcaagactcttgcaacaggggagagagactgaactcaactccactgaaacaaaaggcgggagggatattcagcactgggtgagctggcagaaaggacaggaggatgctaaggaaggtggtttgtgattaggccatcaggggatcagggaggtcaggggcaatggtcaggaagaaacctatcaagtgtagtcacactgagcagaacattgaggctgtcttggccccagggaaatgacaaaggaagggtttgaacttatacctctcttacagtagctcctggctaatgaccctctcctcagcagttcaggtgcataataatgcagtcactgcccataagcttatggttcaggtagaattagtggagttagggtttttcttctgttaaacttgttggtttgcaatgtatcactttctaggaaacttggcacgttggggctctggctggtgttgagaagaaggtgctgggggctgggcaaaccctgctgctacagatgcagagagggatacaaaaggaaggccacagtattacctttaaaagaaaaatcccaataagtttatttccaggtacagttattatggatgtaatcctattaacctgcattttgaatccagattgaacataaagagtgagtgtttggagtctgttctaggctatgactgggtggtaggagacaagaagttaacgctgctactacaattcagttgagaaatgacagtccaatgcccggctatagaccagaatagcttcgtttatcattacctctgagggccctgcctgctgatgggatgagacatcatcttgcttttgcacgcagcacttggtccctgagtagtgactaatactagagaaggttaattgatttgggcaattttggacacagatgttctccctggatcctttgagttgaggctagagcagccagttggactgtgaggtctctgggatccggtcctattaacagcctggtaactaacataggtgtctctgctgttctaggactgagacacactagcagagcccaggtcccctcctgagcaagagtgggcgctcctgccagcatccactggggggtggagggacagggctcgccatccactgtggacttggagctgttaccaaactaattttcactgagaacaaagaagccggcttcaaaactgagagcccagtgagaagaatggctctttttatccaggtcatgcattttacattttccctgtttaataagctaaaagtctgaaaatgccaaatttggatcttttattaagtaggccctaaaagtgcacacaggtctacaaaagtgtgtgcaggtcttatatgccttcacatttaaaagatgtgtttgaacatcccaggtgaccgtccacagggactttgatctggcatacagaatgctggaagggcaaggtattgtgtatctttctgtccctctgggaacaaggaagggatctgccagagaacttgctggagagatggcattttgattatatgagaatagctaacctgctgctttccagtttttagcatagcatccaggaagaatgggatttttgttggaattatgcattttaaaaaaaagctttccagggaggtatgataatgggggaggaaggagtggatattgaacctgggattttttttttttaacttctccaattctcctctcttttcacacacgtgaaatgttttctagcaagtttctagcatatgtatttacccgtgatagtcaagttgtacttttattatcttaaaaagattgttcttggtgtggtgaggctctgcaggagggacagtgcctagcacctctctgtaaattgtatggatgtattgattttatgtagagacggccaaatgcatccgaagggaattgcatcttggtggacatatgtttgaactgttgtcagtaatgaaggtaaatggctatattttaattttgaatctttatctcctggtttttgttgttgtcaatccttgccaataattttgaacttgatcttcatttgtgggcaagtttcatgcttgcaaaggttgctttcaattttgaccctatggaattgttagaaatcataaaccagaagaatcgattcctgaatcttttgtattattttatagggtgtaaataggacttttttttctttttttttttttgcagggtggcaggaggatacagttttactttctaatgttctctataggccagtttccaaattactctgcctgccacgggttcacaaatcaagaaaccatcttgtttagaatggccaggcaatgagattaaatttcctcttggacattctttaattttgagaatgcatcaacatttagctcaccacgtggattgcatagaatgtgttcctgtgcacccaaggagatgtggatttccatttatttctcactgtggctgcccttgtaccacaacagccagctgaaaatggaaaggtttagtcaggaatttacaaagaaccaagcagagtctctttttagatatgcccaagcatcagactgtttgattcaaatgttttttaagcttctctccagatgtttgacaatatgtgagcacagctggtttgtcttcaccaagataggcggctttgctgcagtcctgttagagaatgttttctcttaacatgctaagaaggaaaaagggctggacccccattgtaataagatcgtgcatagcaggtgcatcatatgactaaaagaagaaatacataacacgtgactcagtacaatcccagaattaccatctgggactgacaaacttgtttctcatgtaagaggttgcagcaccctcattttggttctggtgcattaagaattcattctttcctggctgggcacggtggttcatgcctataatcttagcactttggaaggccatggtgggtgaatgacttgaggccgggagttcaagatcagcctgggcaacatggcaaaactctgcccctacctatacaaaagtattaaaaaaatagctgggcatggtggcatgcatctgtagttccagctaatcaggacgctgaggcgggaggatcacttgaacctgggaggcagaggttgcattgagccaagaacgcaccactgcactccagcctgggtgacaaagtgagacgctgcctcaaataaataaataacaaataatcagtcctctccttgcaagtaagactgagggcgggggtgggggcaaccaaactgtaattcttaatagttgctaaaagcattggttcatctaaaattactatcttggcctctttctgacccaccaaagcagtggtgttctcactggttttaatatttgccattttatgtgtgttcactgtgagccaggatttttaataaaccattgcaaacattatttcagttagttcctgtaaactactgatgaggaagtttgaaatcatctctatttcacagatgaagaagctggcttcagagtgggagtttcctcacatacagtcacagacctcattagtacagattctcaaagccatcacctgcttccttaaatcaagcctacatcaaataagtaaatagcaatgaagaaagtcttccacatttcaattcaccacaatgacatttgttaatcacttactacatatcagcgttccatttgggttggttctttttgaaatgttctgtagaagcatctgattctcagcactctgaattattttgggtactctgtggtcgtttctctgaaacatgtgtcttgagtatgataagtaatagaatattttggcagtacaataggcatggtggcttacacctgtaatcccagcactttgggaggccaaggccgaaggatctccttgaggccaggggtttgagaaataatatgtccccttccatccctgcctccactatttatgctaccattaacaaattctacataacataattacacatgctgctgcccacaaagagcaggagaccttcttattcatgaagactctgtggttcttaatcagtgatgctttttccatatccatcatctttatggtttatgtggaggtggacaactacaaagttagaggggacattcttgaagaccaccctcactgctgacaccaatttcaagttcacagattccccaaaccacccttggattcgataattctctaggaggactcacagagctcactgaaagctgttatactcatggttaccatttattacagggaaaggaccccagttagaatccgccgagggaagaagtggcacagggtggtgtcagaagggcaccaaacatggagtttctgttgtcttctccccatggaatcaagaaagtgttattctcccagcacagggtgtggcagtgtatgtggaatgttgccagtgaaggaggctcactagagcctccatgtccagagtctttatttgggactccatcacctaggggtgattgattgcccatgtggctgacccaagtctcaaatctccagcccttctgggagccaactgattctgtatgacccaaacctccaccccatatcacattgttactatccagctggcccaaggtgcccagggaaagaaatacactgccatcaggaatgacattccaaggacttagaaatggcctctcccagggccaaaggcaagagccagacctctctttgggtaaggttaaattctttctctttctctttctttctttggctttttaacatttttttattttttatttttctggatacatagaaggtatatatatttttgggatacatgagatattttgatttagatatgcagtgtgtaatagtcacaggtaaataaggtatccatcacctcaagcatttatcttttgtattccaaacaatccagttacattcttttagttattttaaaatacacaattaaattattgttgactacagtcaccctgctgtgctatgaaatagtaggtcttactcattctaactacttttttgtacccattaaccatccccactcccccctgccagcctgtactgcccttctcatccatccttctactagtaaccattcttctactctctatctccatgagttgaattgtttgaatgtttaactcccagaaataagtgagaacatgcaatatttatctctctgtgcctggtttatttcacttaacataatgatctccagttctatccatcttatttcagatgacaggatctcattcttttttatggctgaataatactccatcgtgtataggtaccacattttctttgtccactcatctgttgatggacatttaggttgcttccaaattttgactgttgggaatagtgctacaagaaacatggtagcaaagatgtctctttgatttcctttcttttgggtatatacctagcagtgggattgctgcatcatgtggtagccctatttttagtttttttgaggaacccccaagcagttctccatagtgggtgtactaatttacattcccacccacagtgtatgagggttccctttctccacatcctcaccagcatttgttattgcctgtcttttggacttttggataaaatccattttaactgggatgaaatgatatctcattgtagtttagatttgcatttctgtgatgagcagtgatactgagcacatttccatatatctgtttgccatttgtacatcatcttttgagaaatgtctattcagacctttgcccatttaaaaaaccagattattagattctttcctatagagttgtttgagccctttatatattctggttactaatcccttgtcaggtgagtagtttgcacatattttctcccattctgtgggttgtctgttcactttgttgattgtttcctttgctgtgtggaagctttttaacttgatgtaatcttatttgtccatttttgctttagttgcctgtgcttgtgggtgttattcaagaaatctttgcccagtccagtgtcttggaaagtttccccaatgttttcttttaataatttcatggtttgaggtcttagatttaagtctttaatctattttgatttgatttctgtatatggcaagagatagggatctggttctattcttctgcatatggatatccagttttcccagcaccatttattgaagagacagtcttttccccagtttacgttcttggtgcctttgtcgaaaatgtgttcactgaaggtatgtggatttgtttctgggttatctcttctgttccattggcttatgtgtctgtttttatgccagtaccatgctaatttggttactatagctttgtagtatgatttgaagtcaagcaatgtaattcttccagttttgttctttttgctcaggagagctttggctattctgggtcttttgtggttctatatacattttaggattattttttctgtttctgtgaagaatgtcattggtattttcataggggttgcattgaatccatagattgctttggaaagtatggacactttaatgtatttattcttctaatccagagacatggaacatcttttcttttttgtggcctcttttttcatcaatggcttatagttgttattatagatcttttacttctttggtgttaattcttaggtgttttataactattgtaaatggaattactttctagatttctatttcagattgttcactgttgacatatagaaatgctactaatttttgcatgttgattttgtatcctgcaacttcactgaatttatttatctgttgtaatcattttttgttggaatctttaggtttttccaagtataagatcatatcatctgcaaacaagtataattcaacttcttccttttcaatttggttgctctttctttctcttgtctaattgctgtagctaagacttctagtactctgttgaataagagtagtgacagtgggattcctcatcatgttccagatcttggaggaaaggctttcagttttttttctcattcagtatgacactggcagtgagtctgtcatatatggcttttactatattgaggtatgtttcttatataccaagtgtttatgagcatttttcttaatcatgaagggatgttggtttttatcaattgctttttcagcatcaactgaaatgatcatatggtttttgtccttcattctgttgatatatcagattgattgattcatgtatgttgaaccatcttcgcatccctgggataaataccacttgatcatgatgaattatctttttaatgtgctgttgaaattggtttgctagtattttgttgaggatttttgcattaatattcatcagggatattggtttgtaggctttctttttttgatgtatctttgtctgggtgtggtattagggtaatactggcctcacataatgagtttggaagtatcccctcctcctctatttttcagaatcttttaagtaggattgatattagttctttaaatatttggtaaaattcagcagtgaagccagtgggtcctgggcttttctttgctggctttttagtatggctttgatcttattactcattattggtctgttaagattttcttcatgattaaatattggtaggttgcatatgtctaggaatttatacctttcctctatattttccaacttattgtcatacagttgctcatagtagccactaatgatcctttgcgtttctgtgttatcagttgcaatgtctcttttttcatctctgattgtatttatttgggtcttctctcttttttttctcaatctagctaaaggtttgtcaattgtgtttatcttttttaaaacccagctttcatttcattgattttttttgtattttttttcaattttatttatttttgttctgatttttattatttcttctactaatttttggtttggtttgttcttgcttttctagctctttaagatgcattgttaggttgtttaaagtttttctactttgttgatataggtgcttatagctataaacttccctcttagtactacttttgctgtgttccgtaggttttgccatgttttgtttccattataatgtttcaagaaatttttcaatttccttcttaatttcttcattgcccactggagcattattcaggagcctagtgtttaatttccatgtgtttgtatagtttccaaaattcctcttttattgatttctagttttccattgtggtcagatacttgatattatttaaattttttaaatgttttaagatttgtttttgtgaccttgttttatcatctgtccttgaggatgatttatgttatgaagagaagaatgtgtattctgcagccattggatgatacgttctgtaaatatcgattaggtccattttgtctgtactgcagattaactctgacatttctgtgtttactttctgtctggaagatccatccaatgctgaaagtgggctgttgaagtcttcagctattattgtattgaggtctctctctctctttacctctgataatatttgctttagatatctgggtgatcccttgttgggcgcatatgtatttataattgttacagctgcttgctgaattgaccgctttatcaccatgcaatgacctcctttgtctcttcttatactttttgtcttgaaatctattttgtctgatataagtgtagctactcttgctcttttggtttccattgacatggaatatctttttccattctgaattattgacaagtaaagacttactcctgccattttattatgtgctttatggttgttttgtggtctcttcttttccttctttagttgctttctgtcttcattttggtgaaggtgatttcctctgatgatatgtttcaatttcttgcttttcattttttttgttcatccattgtatgttttttgatttgaggctaccatgaggttttcaaataataccttataacccactattttaaactgatgacaacttaacactgattgtacaaacaaattgtctacctcacagcttgactgtcagaatgaagtttgaataactgcatagttttgatttttgccacttcttgggagacatcattattaatttagttttttgtgagttgttctgctaactacaacatttgattattacttttttcagcaaataatactgctgaatgtatgtagaattttacacaggcctgctttttagtcaaatatgaatcatctattctcattttgctaaaaaagaggcttaaccaaccctccacaaaattagattatatggtaaaacttgtttttacctaatgctctttcaattaaaaactgttatatgaagttggtggactatacccaaccgggtgtgggtaggctgtactctggtggggcaggggaggggaggggattgagccctgattcctagtctttgccaattgccatggtgtaattttgtgatctatttcaagctaccaacattacatcatcgaatgtggagtttgggaagagatgaaaatagcacattgtaatatttctatctctcagatataataggtcaaaataacctctttagcatagataagaataaggtggtaaaataattctgaagtgagaaattatgagtattcctcacttttatcttaatatgatgtattaattacagttttctacaggttagtttttctctgtggctatgtttaacaacaagcaggcaaatttctggatccttaacagcaggctctggtgagtctgcaggagcctgctgcagctcagttggctgtaccccacctaagaagctgtggctagagagcttacgagcccctccaatggagagctgcatatcatcctgttttatctcagccagcacattgttttctccaatgctgggtcttcctttccaaaacagcctatttaaggagctcacattttaaccaatagaaccataatttaactcgtaagcagaaggttgaatttcatttaggagtttgcttatagttctgggttctgtgatcttgtaataaaatatgctatggagaataaagtccaccatgtctgtatgattttgttaaagtgactttaataagttgatgagtgcggaatggcatgcacacatacacacacacagacacgcagacacacagacacacaaagacacacacacactcagacactcacagacgcacacagacactcagacagacacacagagacactcagacactcacatacccctcctctttttacagccatgtcaagatagaagggtgattttggtgatcagctgtggatgaatagccaggtataaatcttgtttccttccctgtttcactgtatactaattaatatatggtgcttcttacttgattctactgtaaggaaaacaccgtgggattgtagatgactctggcttactgtaaagatccaggctgttctgctgacagccacagatgatgagtttaaacttcttccactctctggattttagaaaacatccactcgatgaggtattcttttgtcatggaataggacttttttttttttttttttttttttttgagatggagtctgactctgttgcccaggctggagtgcagtggcgcaatcttggctcactgcaacccccacctccctggttcaagcaatttccctgcctcagcctcccgagtagctgggattacaggcgtgcaccaccacacccagctaatttttttttttttttttttgtatttttagcagagatggggtttcaccatgttggccagactggtctaaaactcctgacctcaggcaatccgctcacctcggcctcccaaagtgctgggattacagtcacgagccactgcaccggccagaatagtacattattattgctgttatttgatacaaaagaaatgtagtaccttcggggtagtaaatatcattgattcatgtgggcttgaagagatgctgtaatattttttagattattaagaaggctctacttaaacaggtgattttttataatcattgtgccatgggtgacttgagttaagcaaccagaccctttctttaaaatgtaattacaattgctttcaacattcttttttttaaaaaaaaaattcttttttctcctttttccatttttgatacttccaagggcatttttatatgttctattaaggaaatccctgctgtggcagatgctagcagcaaatactctagagctgtctgttgtttctgccttggatgagattttatagcattattgagcatttcagaacattatatcagaagtgcacgctgcagagtttggttgtaaacttaaggtttccattgccattttagaaacctgcttcctaacataatttactttcagtatctgaaaatattaaaagacccaaagcaaataaaacaagagcagtatctattcagttttgatttgtgatgccttttgattatggcgatcccacataattaataatgtgctttatttgagaatcctgcattatataagctagctatgaaagtcactgtacaaaagggggcatgtgttacacttttttccccataattactctgagcactgtaccaaaaagcactaatagaaatgtggcgtctgttgacttcatatctggagaataaaatcagccaaaccacaggggtggaattaagaagtgaccccttctaccaaccccagccccctccaacttagtttccttcaaatgcccagacatgaaattctgatccagcaaaaatgacaatgtctagaaatctgactgttctgaactagaatcctcagtgaccctgcctccagcctcctccaccactttctcccccatggaatttacctccccccctctctctccctcctctccctccccctctctacctcccctccctcctctccctctctctctctccccctgcccgcccctccctctctccctgccccccctccctctctctctctctccccctgcccgcccctccctctctccctgctcctccctccctctctgtctctctccttgcccctcctcactcacccgcctcccctctctctcttcctctctctctccacctctcttctccctaccccacaactgtggactctgagacataggatctgagcttcatggcttaaggtaaaccttattcctgtcttcatggcaatctaaaaatattcatgtaattgctggttgatcacgaactacaaatgaacaccacttgtgagataaattcagtgtgtttttatactaattctgaaagaaagctttcttgcacagtatggttttgcatctgcccatgagtgttgcagccaaaggcagaattccagctaatgccggaattagcttcaggaatgtcacaagttctaggccagagtgagtctctagaacaccagaagagatctgcacgtggtcaccactagaccagtcctattggacgcacaggaataacagtagtggtgacataagccacgagcttaatgcaggttaatgaggacacgcggtggttctcctgttggaatactaatcagattgaaaatcaaccacatcattttcacactgattcaagttttaattttattggagtttccttgagttcttaccccacaaatattttggtaatttcagtcctgcgttaagctctgaactaagcccctggaaagtgaggaggcatgcgccctggttcctgtcctcggtagacggaagtcaaagccaacgtttgcaggacatttcctgcctgccagactcatctagaagtgtgtgtgcccgtgtgtgtgcacgtgtgtgtgttctgaacatgtgtggtctgaacatatgtattttttctaaacgtagacacaacacataacacacatttatatccatatgtatcagtttaatcctcacaacagtgctatggggtaggttgtacctccacattacagccctggaacctggggctggagagttgaaggaaggcccccggtgagacacaggtggagagtgggagcatcagccgccacacctggcttcagagctgctcgccccaccttcagtccttctgtgtagctgaagagctctgcaattaagtgttaggctgggcgagaccagccagtgattttcacactattacctttatcgctgtaaacttttctcaagcaaaacagtgttcctgaatatggttgaaaggacatggctggggacaggatgtctgtgcatggatcccaggaatactgacacaggctgctccatggtctgtctgggccactgaggtgggatgtgtccaagtccagtcaggtggacaggatcacacctggtactgttatagaagagttgagtgcaggaatctgggtttaggtgttagaagaccacagaagccccgggagagacagagaggccagccagaggtgacaaaggcagacaggggcttctgtcagctcaagggaaagagccaggggccggggctgcctgcaggggccagggaggacgtgtggacactgcaggggatgcagcctgaggccaagagatggggagagatgcctggtccctgcctccccacgcctctgcctgccagcggaatcctgtgggcagggaagccacgcagtgtgcgtggagggccagctccttgcaccatggtccggggcaggaggggtcctatggccaatgggcaaatgcagtgcaagggggcagcaagaagctccagccagatttcattacgatggtggagacatggtccgggccccatggggttaggcgtggaaacgagtgaggaattacgatgatggtcaggaacatagctgggccaaaggcaggtattgtcaagatggcagacctgtgcccgtgtacagggagcagaggaaccagcagaaacgaagtctcatgatgggtagctgcagggatgcatgccaatccaggccaggactggaagacagaagagatgagggctgtgctttctgcggagcgtggaagaaggtccacataggtccacatcccgccttccttgagctcagtctgctcccagctggcgcctctgcatcctgcggttgacacacagtgaacctgcttatcaaagccgtggtcctcccacaggagcccattcctggggcagctttctctccttccagcccattgctcataaaagagatggtgtgtcttttccctgagggagaatgacctcctcttggaacagctcatgtgtctttccccgagggagaatgacctcctcttggaacagctcatgatcccgttgctgggtgaatgctttaaaaggtagtgttctcaagcagaaccttctcattctgtagaaggtttcatgagctgagaaatcatccctctctctctccgtcttacacacagacatagagcttttgttgtggaaagtaagacaccaacatagtttatgagatgtaaatataacttcggtaagatgggagtctgaagctgtctaatcgcgtgaggactgacattcccttcagtctactggcagggatcggagctgctcagagtccaaaaatatgcctctaaattgggaactgtgaaaacgccaccccacacaacaaagacaggactcccctaaagggttccagatgctacctgccctgctggcccgtgagcgtggagtgtgcagcagagcgagaaggcaggaagaggaggtgctaggagctgtcatctctgccagaacggacatgatcaggagtcctgggcagcaccaggaggcccgtctctagcagcaatgggtgtgtatcctcataactggctccgaagtagcacctggctaggggacagtggtttacttgtggagcaatgaggtttctgctgagcgtgacgtaagtttggacataaaatagatctagttcagatgtttgaccagtcagggccaactctgcttgtcttccaacagagaacacatgtgtgtccagtgtagcacatctgtgcatgttactattgtccaccatggtgtgaacgtgccctccatgtgtagattaacctctagggcatttatgagtgcctgatgtgtgttgggcatcatgtcttgatctgggggaatatgtgttgtggttctacaggtctaccaaggagtcgaagcccggcgtgtagcagacataacagcaagagatcacggtgacgtgaaaaatgcagaagacctagaaactatgtttcattcaccattttctagagatgaaagttgaaaatcacccttttgtagttagcgtttctggtgctggccattcgttcgtgtgggcacctgcttctgtctggctgtatcaccctctgcctgggggcatcttaaacatcctggccatgcaggtttgcctgcgagcgattctaacagcttttctatgtcagagaaactttcttttgccatttttgaaattttttttttttttggctggatcttgaattttaggctgaaggggtgtgtgtttgtatgttttctttcagtgctttaaaaatatggccacgtggtcttctggcttgcatcatttctgagaggaaatctgttgtggctcttatctttgttcctccgtatgcaatgtgtgttctctcctggctgcgtttaagattttctcttgatcactggttttttgttttttgtttttttgttttatgcaagggtgtttttttttaaatactttaagttctagggtacatgtgcacaacatgcaggtttgttacatatgtatacatgtgccatgttggtgtgctgcacccattaactcgtcacttaacattaggtatatctcctaatgctatccctccccccttcccccaccccacaacaggccccggtgtgtgatattccccttcctgtgtccatgtgttctcattgttcaattcccacctatgagtgagaacatgcggtgtttggttttttgtccttgcgatagtttgctgctataaagacacatgcacacgtatgtttattgtggcactattcacaatagcaaagacttggaaccaacccaaatgtccaacaatgatagactggattaagaaaatgtggcacatatataccatggaatactatgcagccataaaaaagctgatcactggttttaagcaacttgattctaagtgggcttggtctagttttcttcatgttttatttggttctttggggtttgctgagcttcttggatctttggatctgtagttctcatgagactgggaaaatcgtggtcatgattccatggcttttgtcactctgcccccacctcctttgggaaccctaatgactgtgtaacaggctactcagggtcgccccatagctcgctgattctggccatttctgtttttgataattatgttttctccggctgtttcattttagatactttatcttcaagttcattttctttttcttctgcagtgtcccatctgctatgaatcacattctgtgtatttttcatttcagaccttatagttttcatctatagaagtctgattcgggacatcttttgtgtcttgatctgtcgatgttttcttctgcattcttcaacaaatacgggatataggaatggtaactttttaatgttcttggctaattctgtcatcctgatatattttattgattgctttttattctcatgggccctattttttccccaacagactcccaatccatctcttccaccccaggaggaccccaggctccccctctcgtggtagcctggaaactccccaagcggaagccggggcagctgtggcgccccctggctgtgtcctctgcttgggccactgccctgtgccactgcctcagcaccattgtctgtctattttgtttgggtttcccgttgttccaaggtgggtggtggatacacagtccctgccacgccatctctgggaagcctcctttccctcttcgtccaggttttatcaaagtgcccgatgagacatgttccctgaggaacccaggcagaactggaccctgcaggagccaggcccctcccttcccagtggcagcgaatccccgtcctgaccggggcctggtggctggctgcctgctaggctgacacaggggaaggaggtgtggaggtgtggggagggcggggctgagccagggcaggtgagcatctccccaagagcactgtgtgggcatccgggttgtgccctggtaaggcgttggaacggctgaggcctgtggcctgatgttgcattatcattccaccaaaagaggtcacgagactagaattgtgatccagtttccacacctgctggttgtttgaagttaagaagttcatgccccatctttgaactgcagtttgttggctgtgcattaggtctgctcctacatgcattgccctcacatggatttgtgcgaccaagattatacaactcggatgctactgtttataaagtgtgtccacgttgatgattctgcttggtagtcagatgacatccatgagaggcgttctcagtcagcttcatttctgttctatggactgaagtgtacccggttaagaactttgccaaagctgtcactctaggcagtgaccatccttggtctagaactcaagtctcccagtgacaaatcctctttccttttctctacacatcttgttctcaactgcagtttcaccccccagggaacacgtggtagggtctggagccatattattgccacagctggggcgtgggggagggagatgcttttggaattgagggacggaggccagggacgctggtgaacgtcctgcaacacccaggacaaccccccaacaacacaatttcctggtcccacacattggggaacagagttgcagctgggaactcctggtctgcacttgtctgagaaaatacttggaaggccatgaagggccattgcaaataaaatctcagcgtagggcatgattgtgccttgctgttacagcccaggctttatttctgttgtcaagtctaaaggggaatgcatctctaaatcccttatgtcatctgtgcaaccatatagttgaatttaccatcatgttctttcagccatttcttccagatacatacagtaaacatttctttagagggtgtgcaagctttgaggaagcaaaaaatgatatttcacagagtgcaggctccttgctagagcacaagtttgagctaaaaaatgctggctgcaagcacacacggtatggatacaaatgggggttaaaaatgcaataacaattcaaaagaatcgtagtttgtctctcattctgtttgtgccgttatgtatataagagaacatctttccaggaaccaaactgcctcagcaaatggttttcaaatacagtaaaatgctcataaatttttacttataaaatattcccccatagcatatgtttttcagttccatacatatcgatgacttttccatacatatcgatgactttgtatgtctcatccatggtgattttgtttctctgtccctcccactctcaaggttcagctagctgatcccgtgcaaaaggtctgcagcttcatttttcagcaaaatgggccctgttgctattgagaactgagaccttagaatcccgctttgctctgggcccattgctctcacgtattattcaagttgctgaaattctctgcttgccacattttctgcaaagtgcagattaatggaggcacggttctgtagggcccggaagaagccagaagttatcagagctctggccacggagggatcctggcatgaattcctgcaaacattgctcaagatgtttgtacgtgtctgcccagactgcatttcttttattcataaggtaattcttatgaaaataattggtccattttaaccacacagatctttctggcacacactgccagcaatcagagtggcttcatttagtacattcaggtgccaggaagggtgaggtcgctgttttctctcttgtggccccacccaagtcctgttaaacttgagcggaggcctggacgcgcctgtgcagcaggttggccctcttttactgtgggtggagcctgagacctagttctgttcatggtaggtttcctggctgggactggttttttgcccttcctctcctacccctgttctgctgcaccgcttctgctgacagggctgggttttactcagctgactcgccccatgtggttggatgctcctggaacagtcatgtgaccagaaccagccaatcactgtgcttcatccacctggcctagctgtctgtagagatgggcaatgagccgagttgttgatggaatgacactaagcaacagcagccgccgatggagcacctgccacatgccaggcctggtcctccactgtattcaggttaactgagtgaatccgcacgtccgccctgtgtggtacctcatgccatcagcatccccattttacagatcaagaagccgaggcacaggacttagccaggtttgtgcagctggaagatggtagagccaggatttgataccaatgggtcagcccccagatctgctgctcttaactaccaggctgtgctaagtcaggatggtccgaaaccttcagctctgctgctgtgaaaacttttcagagggaagctttcttccccctggagctgctgagcccagagctgtgggagtccaggtagataggaacactagtggtagtgaagtaagacaagatgagtgatgaaaagagagagtgcttgagctacccttgagaggagagagagtggtttagcacctggatccagctggacctgaaagaggagaatcccagacataactctcccccttcaacgttcagctgggcccagtttgatctgtgtttgtggcttttctaccaaactttcctgttctaataacccaagctcaaaaccatgggagtcatcagtgtctcccttgagttcagtcctcatgtcgattgcttgaagagacggttatggttacaagaattcatcccatgtctgtgcacgcccattgagcatgaaattgactcctcctcttctcagggatgggcttggccatggactttctttggctgacgagatgttagcaaacatactgtgagctgaggcctggatgcgcccttgcttcggggtggccctctttcactgtggttggagcctgagactgggatgagaaggaacctggtggagaggagcaccagcacccgccccccccgccccgcccccgctgcccccaacacacacacaaatagcctaagacctagtggatgcatgccctggagaaaccatgtgactgacaccttcccaggtgaccccaggcaagacttgcagaagaaccatgcagctgagctccgtcgaaattgctgacccacagatttatgaattttggaggggggtggttatgcagccaaagctaatgaaaagcttgtagtgtagttttatcttaccacgttttctttccctttcgctcctgtcccatctttctgatatactcatcacctcatggctggccacttgcagatgtgtctctcctttggccttgtgctcactccagatgctgctcttggtattttctctttgctctccgctggggacgcatcttcctaaagcatagccttcgtcaagtcctacttagttggccaggcttcagcagaccctactcacccctgggaagcagcatcacctgcctagaccatacctgaggtcccaacacccacacttaccacataatattttcccaccagcacctcccctcagaacaaaaacttgccaccatgccatgtacattcccacgttttattcttttgcgctttcatctccttcctgaaatgcaaatatgcactcttgtcttttctgaacttctgcccaccgcaacccccactttctccctaaagcctctgcagacaactttattgggcatttttactcctccagactctcatatctgcagtgccctcactgggcacgagctgcatcgctgtttctccagcctgccccactcttcatcaggcccgtttatcttctgctaatttgccaccttggatgctgagcaaccttacttggctttggtttcctttatcaccacaaccacgtgaagagcagccctggagccagtgccagcttcacgcagtcagtcaggaagaacgtggaccacgtttgggtggctcgcatttgctgggcgtgcaaggcctcgtgggcaccctggggagaaggtacctgtgtgctcatcggatccctaagaccagccagtggggaaagagctatcatgacccttcacacctgaacacagagggggctcagggggtgcgcccagcagcccagccaggatttgaacccgcatcatcacagtgttgagccaccttatccaggaccccacagccctcctcaggcttagctacaatgacaggggccaaaccctgtttccatctcatctgtttgcaaagcagattcaatatgttcagaggataaaggtgccagtgttttctcctggggctaggaagaaaagactattgggatgtacctgtgaatttcatatgcaagcattaatatggtcaccggctgcctggtaagaaataagaatttcatccctttccaacggcagcttcatttcgtgaaatgaattggcatgctgtgcttcattttgatgattttggcaaaggacttgggttcttcaaaattgaagtcagcacccctgttccattgcgagatgtgtttggcagccgtgagcttctaaagatctccccaatagagaattgtattccattaactttctaatataattatagggtgacagggagacctgcccaactttttgttattccaccctccaacgcttggctggatttggggtggctattgtggatcacagcaccacactctctccaagaacattccctattgtgaaagcatccctgcggaggaggctgcagttagcacaccagggccctccttcctctgtggatccaagcatgcacagagcccattcactctgccagggtggtgttgggtcccggagatgcacagctgaagaagatccagcccaggctcctaagggcaaccccagccaaggagagagctccacggtgctctgccagacgaggcccaggtgtgggcccaaggattgcagggtactggtggggagggtggctcattgacctcttctgcagcctcagtgaagctggttctccatggcgatgatggaggattctcctgactcttgtgcagaacaggaccactgcagggtgaatcagccctggccaggtaccactgcccatctggtgggccagacagctgtctgtgctgcagtgcccaggcacgggccctgtttctctcagcacttgccccatacgggtttctgtcgacatccagctccttggagcagcactgaattgcttcattcacacgtctacactccacgttcctctgatcctcccttggttggagagactcccaacacacgcacccactaattacaccacccccttgagtcgagaccaacaatctgatgagtgcatcagctccaaattattttactggattggggtgccagaatgccaggctatgccatctaacgtgagagaaatggggagcattggcccgcataggtgagccatgctttctttagacttccaggatatcacgagcccaaaaaattcataaaacacacaaaagaaactcagctaaaggcaaaatgtccaatgctgctgcattccttgtttcatccttccacaccgccatgctgtaagcaaaatacagcccagaaacctgcacagttctacaaacagatctgtgtgcacagcagccctgaagctcagcatcaggcttaggagctggagagtgatgggccagtgcccagcctgtgggtgggggctgtgcatgactggtagcattcacacatggacatcacagtcccaggacaggtcctgtgtccccgtggggccctaccctgttcctctcgcagtccgggaagcattgtcagatccaggctgcaggaggacaagactggctgtagctctgaacgctcatggctcagcaaagccagtgtccggcatgtgctggccttaggattttaaccatcgttggaaataaaacacttgtgtggtgccacctcagttaataatctgctttctaagatacaaattttaggccaggtacgatggctcatgcctgtaatcccagagttttggaagctgaggtgggaggttcgcttgagtctaggggttcgagactagcctgaacaacataaggagacctcacctcttaaaaaaaaaattaagtagccagttatggtagtatgtgcctgtagtcctagccacttaggaggctgaagcaggagtatcacttgggcccaggagttcaaggttccaatgaactatgattgcatcactgtactccatcctgggtgacagaaagagcctctgtctctaaaaaataataaaataataatgagataaaagttccagttccctggatatggtagatgcttgaagggaggtactgttttattctcgtgtgtacccagtggtgcctggcagaggaagggccctggagtcacagtcaaggtcagctagattttctcctatgttatcttccaggagttttataggtttgcattttacatttaggtctgtgatccattgtgagataatttttgggaagggtgtaaggtctaggtccagttttatttctgtgtatgtgaatgtccagttgtttcagcaccatttgtgaaaaagataatgctttctccattgaattgcctttgtcttttgccaaagatcagttgaccgtagttatgtgagtctgttctgcgggggaagggggcttcgtgggctggaagaagtgggaggcctgagagtgaaggattcctaaggaagtgaggggtgaggaatgaaatttgggtcaggattattggcctcggctcaccatgtgattgttaatgaatcattctcagcacaacttttaatttatttattggttctcataatggagcctccattcattctaataagtaccatgagcttcagcctctgaatacatgagaggagaattttagggaaatggccacagggagtttgtgtctcaacttgccctttaaacaactggagttgcagtgattttctgattctctgctatttccccattcctccctgaacaagcatcagaaggaaactaaatgcaatctgacaagacaacccttcagcaggttaatttgtactagaccctcaattttccagctagaaatctagcttgaaacactactactcaaacaacatctatcaaagcccaacatctgggtctcccagctgccaagttcaccccgtgaggacttgtcaacacgccagtctgcttcgtaattgaagtactattcaaagtgtcaaagtcttgtccgtggaaacagtctgcatatgcagttacaactaagtatgggttggaaaaaatacaaactgaggtcagctcttcctaataggagcatctaagcaatgtcttaagtcttcaagccacggttgtcatgatatctgtttgtcacccccagaggcaaatggaggcagttcaatcgatgattctgtgggaggagaagggcagaataacttaggcaaagacaatcactcagtgccatttatttgtcttgtatgacgccaatgatcatggccagtcttgacctagtgttagcagcagtgatctaacatcgccgaggaaggaatctactattgctgcatttcccacagctattattctgccctccaaaaggcaaagcacagagtaggtattgttctgacctccaaagagcaaagcacagggcagggtgaggtgactgtgaccagcggccacaacagagcttcctgcctttttaacggaacagaaccgtttttaatttttttaaaagatcattccacaataattcatttgttcagcgcctctgtaaacaaatgcttggagttcacacgggtcccctgtggaatgatccttctaagtagctttggctcaaaggcatcccacggtggtgattgctttaggattgtttccactggagtgaattatacttgaggtagaatttgtactgggctgatttgtcttaaattgcaggataagttctaaagtacaagaagtatgtactctataaaaaatgtcgtggggcctgactggtatcaagaggactgaacatggagagacaaaagagagagagagaaaaaaaatggggctctgcagctgccaatatttgatgcccttgttatcaagccataaggctgaaaatgcttttgataatgtttttagaactaagcatgctcctgtcggctgttctctgtgttccttgagtagtctctaaaagattggaagaatttgtgggtgcacctaaaacagtcaccatggaccttgccattcacagtatgtcctcagatcagccccatcagtgtggcctggaagctttttattatgtttaaagatgcaaagtcaggaagtcagtatgtctagccatcttaaatcactttttttttaaattcatccatcagtttggaaaaataatatattccattactttacacttcaatgcgttactgtgcaatgcactcattgatgactctgaaacacaaacaggacttcccagacctctgcttggaagctcctgggtattaagtctgggcaaccccatctcctcccagcctcactaacacgagtcgcctcttctcaggagaactgagaagagagctttgcatgtgacagctccaccctttccaagggggtcttcaattgcttgacagccattattctgttaagctcctgtgcctctcctgtttgagcagatagaaccaggttcagacccaggcacagcccagtgactattattgaacaaatgtattgggttggtgcaaaagtaattgtggtttttgccattacttgggtcagcattgtcaaatctacacctactctatggcccagtagtttctttcctggattttatccaaaagaaattaaagagatgcaagagaatgttcaaacctgcttttaatggccaaaccaaaatgacttttgcacccacctaatagtcgtgataaagtggcattaaactggaaatctaacttgacttgtcactcctccttccccagggggctgagccccgatgctaatgaccacagtcgaggatgagttgaaccctcagccagggttgattcagccgattggccagtcctgacgttaataacttgcacagacgctttgcacgcattaagcaatttcatcttctcagcagtcctaggaagatgttgctgccacgatcctcaattcataggttaagatactgatgcacagccattaactgacttgctttttgaactcagtttgagagcctcagagtccacatcctaaaccactgtgctggcctaccaggggcctccaaaagtacttctacatcagcattatttggggatgcttctgaaacatacagctcctgggcccctctaagggagagtctaagtcagcaggtcatgggcccaaggagttgtatttttttttaaatttttcagatcattgtgatgatgggccaagtttggggactgctgttttagctcacaaattcctggttgatgaccatcacattggttcttggtttttgtttcaaaaaagaaaatcaaatggacatctaatctgtggcccaacaatttttttcctatattttatccaaaagaaatgaaagacattcaagagaatggtcaaagcagctttattcacaataggtcaaaaactggaaacagcccaggtgacccacaacatactggggttcatccatgtggtggaattctacccactgatgagaaggagcagcctgctagggtgtgcagccacatggctgagccttgaaaacacacgaagcggaaggggcctggctcagcagtgcaagtccacttataggcacctctggaagaagccaaactaattggtggtttaaaaattgtcatggtggccgggcgcagtggctcatgcctgtaatgccagcactttgggaggccgaggcaggtggatcatgaggtcaggggttcgagaccagcctggccaacgtggtgaaaccctgtctctactaaaaatacaaaaattagctgggcatagtggtgggtgcctgtaatcccagctactcgggaggctgaggcaggagaatcatttgaacccgggaggcagaggttgcagtgagctgagatcacgccattgcactccagcctgggcaacagggtgagactccatctcaaaaaaaaaaagttacagtgtttgcctctggcagtggtgggagtcggagtgacggggggcactcctggactgagcaggccctgctcacagcacacggctgtctaattgtcatgtgatgaatccaactgcaaggctcttaaaatacctcccaaatccttaaagaaacgtaaagttacattcaggataatcaaagtgctgataaggatggttgagtgtactttagtcatctgatacaatttgtgtaagatttatgtggtcacactcagggtgtgcttgactgattggaatttctcgcccacactggataccaaatgtaggctgcctgaaatccttgggaacaaagtgccttattcaagaataacagaattttatcattgactccattgcaatacaacatttggcatatggtatagccaacaccatgttatattatagcagggttttgttttctttcttatgttgggttttctaattagaagtgtgcgcatagtgtggataagcccaaagatagcacactggttttcaggagagttttctctgtgttaagttgggccaaggcagcttagattcaacatgcccagttccacacaggttacttggttgggctgtaatcttggttcttaagttcatcacctccagccaaggtggacagtacagagctctagccccgagcatttgcaggacaggtgttctgagcaggctgtgtatgactcgtgatgctggtaacttcacaactaagggctagtgaaaaggaaaagatggaacaaaggaagacagcacaaaagggtgcctacaactgtgcaccatggagagtttacataatggaaagaatattaaagatacaaactgtgatttaaagatacgcaaaaattgtgatgcagtcttgaagaaagtgaaattttaagacaagtctgccattgtctctctgttgttttggccccatgtacatatatttcctctgttttcgttggtggtattgatgctagttgtgttgatgttgatgctggtggtattgatgttcttgctgctgatgtcagtagtgttgatgttgctgatgttggtgccattgctcttgatgttgatgctgatgtaatggtgttgatgttggtggtgccattgttggtggcggtggtgctgatgctggtagtgttgatgttggtggtattgatgttgatggtattgatgttggtgttgtcaatattattgatgctggtggtactgatgttgctgatactgttagtggtgctgatgttggtggtgctgatgtaagtggtgtcagtattgttgatgttggtggtgttgatgttggtggtgtcaatattgtcgatggtggtgttgatgttggtggtattgatgttgctgatggtggtgtcaatattgttgatggtgttgatggtggtggtgttgatgttggtggtgtcgatattgttaatgttggtggtgtcgatattgctgatgttgttggtgtcgatattgttgatattggtggtgttgatattgttgatattggtggtgttgatattgttgatattggtggtgttgatgttgctgatgctgatggtggtgtcagtattgttgatgttggtggtgttgatgttggtgttgatgtaggtggtgttgatattgttgatgtttgtgatgttgatgttgatggtggtggtgttgatgtaagtggtgtcaatattgttgatgttagtggtgttgatggtggtggtattgatgttgctgatgctgatgttggtggtgtcaatattgttgatgttggtgatgttgatgttcttgatgctgatgttggtggtgtcattgttgatgttgatggcggtactgatgttcctgatgctgatgatagtgatgttggtgttggctggcctctctgcaagtttgttttcctgatgaagactcagatagatggtggcatgctttgtgtcaggcgtgatttggactggcaatgccgtggtgaaaatatcagatgagatgtctgctttcatggagctcacagtctggggtgggggccaggcatataatgaacaagtccatgtacaatgacaatatcaggaagcaagaagtgccatgtacagaatcaaaatattaaatattgaaagatagtatagaacatttggggaagggctactttaaatagtattgtcagagaagaccactttggggagtccacagttaagccaaaacctggatggcaagttgaagcagccatgaaagatgagggatgagccaagttggcagtggaggtggatggagaatcattttcagctttgagctgtcgtgcctgtcagcctgggatggtcaaccagggcttgggatttgcccatggtagagaagtaggtggagcccagtaggtttgaatgaagtacgtaaattagactctaataaagtcactcaaacccatttaattttagctcaggaattttcctggaaattgaccaaagtggacttttctatctcttgactgttttccaggagacgcagaatacaggcctgtgtcagtgctgtagcccacactcgctgtgggcctttccggagttccattgtctgtgaagtatgctatgccctgcttagcctagagatttgtttccatcatatgtgaagcgtgctatgccctgcttggcctagagatctgtttggcttctcctggacaatgcccacaagtaaccttttagttctctgagttttttgcttcttacagagcagtcttcccctctgcaggtcatcacctctgttgccccataaaaataagttgttaggaaacaagctggaaagtgggtgctgatgcgctgccttaggcaatgcctctacggctacaacccgtgtgccattccggctcttctccttcacaatggctggtggctgccagtgagataaaatggcagcctgtcgctttgtgcctccctgcaggagacaggttcccagggggatatccgctgcacacagggtagattcccactccatcttggggctagtggtcttgtctggtttagtcttccttcctctcccctcctctcatgcctccctagccagtcttcttggatggtaatgcaggtcagagtcatgataaactttcactcccaaccctctagggtgaccccctccagaaagagagcagacccagtgtggattccgctacaggtggcccccaccccagtcctgggagaacagtggcccgtacaaattgccatggaggcaggtggatgcccctcagagcctggcccatggtcctcagtgtcccccacaaacctccccctgaagcaagacctgaacactctggagcggactctccaggtctgtgttgttgtgacagctcagcagccacactgccagacaaagagcaggctggggagaaaatggccgtctgactgctgctcatcacacacaactccaggagcaggtggagacaggagcgctcagtggggccgagccgggctgggtgtgagcccctgcaagttctggaggctgggtcccaggttctgacttaaaatcacggctgctgttcatcctcaaactcgagagaagtttggtgtcaaatgttgccttcatcctcctttctctaaactcaataaggagacccccacctctgctcgtgcatactgtgcaaatcgctgaaatctatcaacttgaatagacttagaaaatcatatgctgctatgaaagaaacccataaatgaatctttatatttgaagttttttcatttaacaaatgcattgttatccattatcctttcagtacttaacaaacaactcataatgaaatacagaagggctcaattggaaggcttttctttttctctccaaaatagctatttccttgcaggtagtaattttgtttcaagaagagcgatgtttagcaccaggctttttaataaaatatgtgtgagagaataattcttctaaaacattctgtatctacaaaaatctatatgtgagagaacttgaattattctctaatagattttattacatagcagttaagaatttctctaagagacatctagtcaaaggcatcaattttggataacaaagcattggagagaaagggacttattgaaaactggcgttatttgctattttgtgaattctttatctgtttctctagctatcattttctcctggaaggtggagcatctgaggctgtgattgagtgtggtagcgcctcgtgcatgcctattgtgatcagctgcaaatgactgagctgacattcattcgcccaacctgcactctttggcgtgggccctccgccagatgccatgccctgcactggggaaactgaggctggaagaggactatccacagggagccaccttgcatggtgggagtaacaggggctgagttcaaggttcaggggcccatggcaggggcaggagaacaagggcagggcccccaaacagctgttttaataaattaacatgatcctgtaggagccgatgctatttgttgaggtatgaggaccagaaggcggcggtggcctcgtccgtttcattcaggacttaatgttgagtctgtgatgtgtcaggcatggttctggacctagaccttcaaccaggagaaacatgtcccaggccctggagctcaggcacctgagggggagccgaacacgacgttcccctcgttaactacagcacagcctacgaacccccaggaggagctgtgggagggagtccagccacatggagcctggaacccctccccccgccgccagccccccgcttatcctgagaggtcgcccaaggcttccttggtggtagcagctgtgctgcagggcagcccgggactgcccagcaggggaggaggcaggaaacagatgaggctctgaggtgggaatggccacttaagaaactgagactgcagcctgggcgacagagcaagaccttgtctcagaaaaagaaagaaagaaggtaagagagtcctgggcaggccgggcactgtggctcatgcctataatcccagcactttgggaggctgaggcaggtggatcgcctaaggtcaggagttcaagaccaccctggccaacatggtgaaaccccatctctactaaaaatataaaaattagctgggcatggttgcaagcacttgtaatcccagctactcgggaggctgagacaggagaatcatttgaactcaggtggtggaggttgtggtgagctgagatagtgccactgcactccagcctgggcaacagagtgagactccatctcaaaaaaaaaaaaaaaaaaaaagagtctagtgcagcaagccagggacacacagcaggagagaggaagggaaggtccaggtgccgtgccatgcaagggaaagctcctcgaacatttttttctctaggtatttcattatgaaaattttcatacttacagaaaatctgagggaattgaacaacggacatctatatacccactgtctagattttataattggccagccacagtggctcactcttgtaatcccagcactttgggaggctgaggcagaaggatcacttaaggccaggagtttgagaccagtctgggcaacacagtgagaccctgtctgtacaaaaaaaaattaaaaattagctgggcatggtggtgtgtgcctgtattcccaggtattcaggatgctgaggcaggaggatcacttgaaccaggaggaagttgaggctgcagtgagccgatcacgccactgcactccagcctgggcaacagagcaataccctgtctcaaaaaaaaaaaaaatctaaaattcacatgttcctgtgtttccttcatcccatatctatcctctgcccatccctgtatccattttacttttcaatgcgtttcaagataaaagtgcagacgtcagtatacttcacacctaaacacttctgtgtgtatctcagtagtgttcaatattcatttacattaatgaagcaacatttcctagagaaaaagccatccattttaggcacgcattccctcagctttgacaaatgcttacatttgggtgaccaagactccaatcaagatgcagaacatcattctagaaagttctcatatccttgttcagtcagcccctcctctggccctagagcagccactgctgtgatttcttcactatggttttgcctgtgctgtgttctttggatgtgctgtaggcttggtttgatgttggctctgcttcttccaatgaaaatactgcatgcagcttgggctatgatgggtgaagctgctgagaacattcttgtgcaaatcttgttgtgggcaggtgtttttttttgtttgttttggggattgattttttttttttttttttgctttttgttttttcctggtgaaacatcttgccttaagtctctcttatccaatgttaatatcagccgtgaataagcctcttacgttcaccattggcatggtatttttcatattttgactctccacctgtctgtgtactcacagtgtgtgtcttgtgaacagcatgtctttgaaccttgatttttttccccatcctttctgacaacccttgccttgtaacaggattcctgatactttctggtatgttactggtgggggtggagtcgggtctaacacttgtatttgtgtttttgtttgctctgctctgtttgtgatgtctcttttcctgcttctctcctttcttgtgttaattaatttgttttagaattctatgttaatttagctataggatttttagctctacctctctgcactatgtttcaggggttgctctagggattacaatatacatcacaggctactgaaagatttggggttttttgttgttgttaaaaaaagaaaaacgaaaaaatgcaaatcaaaaccacaatgagataccatctcacaccagttagaatggcgatcattaaaaagtcaggaaacagcaggtgctggagaggatgtggagaaataggaacacttttacactgttggtgggactgtaaactagttcaaccattgtggaagacagtgtggcgattcctcaaggatctagaactagaaataccatttgacccagccatcctattactgggtatatacccaaaggactgtaaatcatgctgctataaagacacatgcacacgtaggtttattgcagcactattcacaatagcaaggacttggaaccatcccaaatgtccatcagtgatagactggactaagaaaatatggcacatatataccatggaatactattcagccataaaaaaggatgcgttcatgtcctttgtagggacatggatgaagctggaaaccatcattctcagcaaactattgcaaggacaaaaaaccaaacaccgcatgttctcactcataggtgggaattaaacaatgagaacacatggacacaggaaggggaacatcacacacaggggcctgtcatggggtggggggaggggggagggatagcattaggagatatacctaatgtaaatgacgagttaatgggtgcagcacaccaacatggcacatgtatacatatgtaactaacctgcacgttgtgctcatgtaccctagaacttaaagtataataataaaaaaaaaaggccacagcttgtgaagaccagatcggatgggcaaataaacacacaagactagtgaggtgttcccaccggttggccggttgattttccagttaattgaaaaaggagtttcagaatgttctagctcagatgaccacagtgtacactgaaactcttcctgccatggaactgtattgatagtgtaatcgataatgctatacacactcagatcagagacaaacagctccgacttccggtgacacctttgagaattgtctactcactgctgaatttttaaaaatccactcttaatataaaaataacatggaatttgaagaggaacctccaggatcacatagtgaccctcctttcctgttacaatctgcaggtgaacctcacagggccacaggaggacctcccaaaaaacacacgtagtttaaccaggatctccagaatctctgtccagggtggtctaatcttttgtcttccctgggccacattggaagaggaattgtcttgggtcacacataaaatacactaaagatagctgataagctaaaagaaaatcgcaaaaaaaaatctcataacgttttaagaaaggttacaaatttgtgttgggtcacattcgaagccgtcctgggccgcaagtgctctgaggacctcaggtgggatgagtttgccctagccctttactccagctgtcttctgtaaaggacgagggaacctagcattcagccccagcttctctcctcggaatgagtctccttccagtagaggatagaaccccacgtgtcctgagccttgagtaggagatgggggcgtattgtgacttgccgggagcatggcctccaggctgcatggcgggggcaggtttccatgcttacggtggtcctcactgctcatggaaaggagcttcggacacccaggtccctcctgagcctccctgcactgtggctgtggaggtcaggctgcctgtggttgtgttttcgtagctcctggagccctggttgcggaagccagtaggcacctttgcccactcatcctcagcgtcaggcagtcaggagcatctgggttgggggcacagccccggaccttcatgctgctcactctggccaggtactttcatcccctatgcctcagtttcgccacctagaaggatagcagtgcctcttgctctgccctgttaaaggttatgcgggactggggtgcaggtgtgcctggttcagaacaaggattcgatgaacggcagctgtgacttcattctcagcgcctcctttctaccctgctttaaagaaggcaagtgtgagtgtgctaggggggcttagggttgtttgtgggccacttctttatctaactgggccctgatgcttcagacagtgtccctgaggtcacacagggaggagggctccaagccagaatttagacctcagcctgcagacacaggacagatcccagcccacaaacgcaggccagtgccacctgccatcccatgagggcaggaacacgggggtgtcaaccttgagctcctcacctctgtgctgagcagacaccaggaacagggcttatgagcaaggctttggggacgatgaggagaccctgaattcatctgcaccttgagccggatacctctgagtgctcctgcactcccccagcctgtaccatggaaccttgttttctcccctccagatgtgggcatcgattctgtctgtggcaggggtggttggaagggtcagtggcaccattatgcaaagcacccaggaggcacgggcgcagcttacatgtccctgagtcatgcgctaggccatgagaactattattattagttttatgactcttgttgctatgacaacagcgctgggtgtgagggctgtcacttccctgtcggaatcactgtggcatcctcagccaggaggaggaggcccagccgaatggagcagggcgtcccctggcctcgggatggtcccgtgtgtcagtaacatgttcatactactgttgtgtttgtcaaataatggaagtatcatcataagctgcactgggaaatggaaattaaatttttcagaggatgcacggtgctgataaaggatgggcaccaaggcagccacgtgcacaatgatcaccaattataaagccattgctcactcgcgttcggaattgcagcgtgaattaagatgcttgtttgggaacagagtccccagtagttgctcattacaattccacatcacgggcgtggagagggagagaaacaaaatgcagtgtctttccacctgggtggctgcctgtgccgactctgggtcctgtctcaggccctgcagctcactgcaaagagacttgagtaaccaggtatatttgttgtgctgggaaaacacagaaggaagggaatgtctgcattctgcaatgtgtgctctttcctctcaagacacagagaggaaaagacctctgagaggcacagacacctgcgtatcataagaaggtagggctgtgtgactgatgggaagaggaactgtctctgcagcattaggcagaggcattttctgtgcatgttaatatttagtctttataaatcctgtttccttcatatcgttggcgtgtcaagtacttgacgtatagcctcacagcccatccagaatgagccttgaggttgaactggcactgggacatccagcccccagtgcaggcatgccctcaggcccacgcagccgctcttgatgtggaggcaggaaatggaaactcttcaaattcctgagcactcagctctctttgcagcattgtgctaagcatatctctccttgacatcgtgtcattcctgtgtccacagcaggcaggcccttgggaatggctctggtgaaatggggaggagagaactttcttctccgacagacggttcatgatttccaaggtcttctctggttaagaccagaaacatgtttctgtagagcccaaaacaggccacatccgctcctgctctgagctacaatagactcaggctgggggaggtggcgctgccatccgccatctccagtctccttatctgatgtttagagcttcatagtttaaatggcaatcattccttgaagcctgcagcctgcgataatacagctaatacattattgcctctggcttccgtgcagaacagcggttagagacgggtggaaagagagagcattggggtgactgagacaaatggagtgtggcctgcttgggaaatgctgaaaagtgttggtgtttacctggctacgtacttggccacggagagtccaggtgggaagaatttattaggtgagcgatgtagctggaacgaggcctggctgagattcaggagacggctgctgccgtctctgccccctcatccttgctgaatctcagaacctttgggcctgcatctctgcggcccggagacgctgactccagttgcctaacagagctgtggtgagactcaaaggccacacagaagcagcgtgttccggaaagcatgccgtgccctgtgaactagaagagggtactggaatactagctatcttcacaagcaccaccccgccactgcctccaccattcgttagggagccactcattatgggacggaccaccagacgcgactaatgaaacttttctgttctctcctttctaggtaagtgattccggtgctaacgctggacacgtgtgtccttgtatatacctgttgcgcctgcgagaacatgttctccactcccccagctcctctgaggaatgcctgagtgaggaccccgtgtaaagtaagatgaaccgagtgggcacgttagcccaggccgttaccctttagtgggcgcgtgagggctgtgggtcacagtttccaagactgatggcattgcatgatctttcatggtcaaacttgtgcaaatgaagaagtggagtgggggacaggggtgggatgagatagctaagcagtgagccagaaaaaaagcagttgacgtggacgatctaacctgagaaaccatcataggaaatgatgactctctgctccaatgcagcatctacaaggcccaaatgagatagaacacagagtttcaatgtgaacttcaaaacctgctcctgctgtaaggtgcttttcccatcttagcagcctggtggtctactttgtcgtttttcctgagtgtagcttggaagcttccatctctaaatctttaacattttctgggaatttgctttctgtttcccagggttgtcctgggactggcctctgatgaggcaaaggttgttctcttggtgtagccactggttcaagaagtgttttgggttaaaatgttaaaaatacatagctagagattatttttccagctcattgaaagaggagttacagatgcaacattgtctgtggttgtgtggttaagaagtgttccctttgctcctgagtcatatgtggaaaatcttccctctaaccctgatactgcacaatttgtcagtgttggtgagactcatatttagctgtgagcttcctggcgtccaaaggatagaggaaaataagagcactcaaaacagtcgccaacatcacgaaggagaaactgccgttattttcttttttgttactggcagaaattactcttaccagaactagcttattgcataagaattactctgtactggggctcctgaattggagacatcaaataatgtattaaaccacattcttaacatttctggagaagacacagtggagggttccttgtggttgttggggcaatttatttactaaaacagtgggatcacactgaagtgtcgctcaccgtgagcatttctgcacgccaaagatgattatgcctaaatgaatattcttttattggcttgatggaatcccagggagaacctagaatacctaaaaaaaatagacgcgttgtaaatactgtgctgggtactcctcccagcaagaccttgatgaggactgggcaggaggccccttgcctggggttgggctgcaaatgtcctggggtgtttgtggatggaacaactggctctaagaaacgggatatacgtgatcagggcgaggtctttggggagagaagaagctcaacgtgggcccacaggaaatgtgtccgttcatagttgcaggtggagcaacaggtgagtcaggcaagcatccattagatcttcaatcagctgctccacattgcaaatatgaaggatatgctttcaaaaaaggacaagggaaaataggaaaaggggtcgtaaaagtaaagataatcagccagcattactgaaagtgaagagaaaatttcttttgaaaaagcaacccagatgtttgtccggcatgagtgtggtatttgggatcatgaatgctgaagagtaagtgtgtcctggatgttggcgtcgggtcatcactgaccctaaatctcctcaagtctcacagaaggatgtaggtcatatgttagaggtaatatgtcataaggacataggtcatactttaaccttgaattcagggaataacatttggctttagggtaattgactccaacatagaatgagccacattctctatgcattgggataattcttatttatcattaactaaattattaataactaatgatataaattacataattactgtttattaaacaatttgtattgaatgttattaacatgtcaagcctgtgggtacagtggacacaattttcttgtgaatttcatctgaggattggcatctgttcccacagcgtgaaggtgtttttgctgtctgaactctgcgtctttggctcacccaaacagggagaagaacatgagccaggtcggccaaggaggcctttgcttatggtctggttttctataggggccagagatacgcccccatcccactcgccatccctagaccacagcagccttccccatgtcctgttgttggaccgaggcacgcctgtcttgggaacaaggacctcactatttgcaactttcttggagggccttcaggatctcagagctctgtgcctcagatcccgcaggtagtactgaagactggagcctgttccaacggggctggctccgtggccggccacacactggggcgcgagcctctgctgccctctgtgttgcccatgtcttcctatggctgaggctggcttagcctgaaattcaggaggttcctctctcaaggaagcctattagatactcagatgttcggattgtggtttttttctcactgtctccagagacacatctacagctaaaatgatgcttgggatggctccttaaacatgaccttagatagaggtggggtgtttgtggtgacatcctgggccttctcttcctttaactcaggggatctcaacggggggcagggggtggcttttgaagcccatagaggttgtgactgcccaagatcccaccgtaggcaatggatccgtttcatcctgaccgcattcctccaggcgcagacacgtgtggtggctgcttttcagcagagcggaggatccaggccccagcccctcgttaaacatccagccccacctgcatgtcaggcacaatctggacgttgcagtgacagcgtctttgccacatgcaaatctgactaatggcctaaattggtaccagaagaacaattacatggactctttcctgatggctgtgcgtggtggcactacccttgatctcggcacagagttggtcagaaagcacacgctccgcttccatacccgtacacgcgtcctcatcaccttcaccgtttcctctccaagggcttgatttagaagaagtgtctggtttaatggggaaaataaaagatgaaacagcaaagtcaggccactcaaagcgctgcaaatgttggggagggggcttctctttcgttacacagctcagtgttcattgtttgctctttaacattttgcttaagatgtagggctggaggctgttttcctggtggagattattttaaaatccgcatctgctttcactcatgtctgggaagggaggtgggtgacgcaagcgaggctcattgggtggatttggttcattgtggggtgtttcaccgtttacagcaaagtgatggctaaaaagagttaaatgaagacgagagcaggagagagcagcaccgtcatcagcctggcattctgctaccagcctgtctagagggtggaaaggaaccctgaaccctctgaatgcagattcagtatgcttcagagcgtttctaggagttaggcgtagcttcaggacggcccgctttggaatccaatcaatgggagcatagtgttaagttcaggaatgaaaggttctgagggcgactctcttttgtctttgcagcctgtgatcttaaggagacaaattagcactgcagatggaggaggcggcactgggctttgggactatgcagggggccccagtgtcagtgtggaccagggaaaaagtacccttcctaacgctggtgccccactcagcacttgcttaggaaggtctgtgccagggccaagggacatggtcatggccgtttttattctttcctgtagaatccatgattgaccctgtgcttggcatcctgcctggcaagccacagtcgctcactgcaagttggcgggaaaaaagaattggcacatgagagtcttcactcccaggacgctaatgttctcgtgtgtttttagggaaattcagtcctcacgctgcttatgttaagatgaatgggtttattggttgccccacagtatatgaaggtccacgcagtgtttccattcttcccaattaataaaagtggaaaatctctattgatgtgttgagaaaggaactcagacatgcaggaatctgccaggtccattcgaagtctggtgatggtacgaaaacatggtggctgaattagacaaatgcagttcacactggatgggatttgagagtcatttgctccccataagaattctgaatgtggagaacaaaaccaaagtgactttattatttgcgttaaatatttacatagaggggagtaaacagtgtgtgagacacactatgacagaaatgaatctttctcaaaatgacaagttaggaaacgtatgcattcggtggagagtaaagacgctcatgcatcttctttgcatatgcggtgcatgcaaaaaacaaaactctagacaattctctgtcctcattaaaatccagttacagtaatagctcagccttaaactcgaaacattacgaatgcaatataaatgtttaaacagtttggttgcataattcttcagttcacatttcctaccattggtgacctggttctcaattgtagctggctttctgggatctatttggtaaaagaaatttgaagaatacgctactgaatacattacatcgtatccacattattattattttctttctcccttaaggattaagcttccattttggcagctttgcctgttgggcagaattgtatcagagaattaattgtatcaaagaattaattcagtggatatttacatggtacctactaggtgcagatcatgttgctgtatttacttatagagatgagtcggcctgcaggagctgggggaggaaaaggctgagccaactctagcgtagggtcgacctgcacgttatgagagcaactcaagagaggctttttgggggtctcgagggacctgctctgtctaactcactctggatgggaactgctgggagaaaggagaggctgcagggtggtgctgggtagggtttaaacatttgcgaaaggaaccatggacactgtgggtcgggagatttttggaatactcagatttgagcaaggaaacagcaaggtccacctattcagacatgaggctgtggatgccccaggctgctggaagaattaaaattactcgaatcagtggctcgtaaccatggtggctttccaacagtgcagcttcagtgaaatatgccccgttttgagacttttgagtgttttgttttcctaaatgagtttgcaacatgtgtgagattgtttagcagaatgtagtttcttgagtcagatgcaacaactaaaaataaatacaaatacacatatacacaacagacatctataaatatatacatcttccccaaaggtagtttttctaaaagctagaatagcttttggtaccacatctaattaggagatggtagaacaaggcgcagccatcttgattataataaccgtcttcagataacgtggtgttaaattagctcactcaacagctactttgtaagtagatttgatttatttttagctcttattggaagccaggaatccaaatggagatggagggttttccgggagcacgggagatcgctggccagcagcacgtgaccgggctgctcttctgagaagtttgctgtactttgcaggaggaaattttaagtaaaacccacagtacaggtggagttcactgtgtctcaggcaccaggtttcactttaagaaaaacagacgatttttctaggaaaaaaaagggtacctcctacaaaatacctgacccgtactcctcaaaccatcaaggtcaccaaaaatgaggaaaatctgagcaaccgtcacagccaagaggtgtttaaggacacatgatgactccatgtcatgtgggatcctgggacgggaaagaggcattggggaaaaactgaggccatctgaatgaactctggacttcattaataacaacatattggcacttattctaacaagtgttccatactaaggtaagatgtaaacagcagaggaaacagggcaggatcgctctgtgttatctttgcaacttttctgtaaatctaaaactattctaaaataaaaggctcgctttaaaatgtataaacaagataatttaaaacgcccatgaccccaccgccgggaagacgtcgctgtcaggatggggttgtatcctgctgtctctgtgcgcactgtcgtgcagagtgagaccatgctgggcattcaagtttgctgcgtgcattttcccttcatgttgtacaaacataagcatgcttcccgtgtccctaaaaatgtgtttggtcaatcagtcagtgtgtaaataaatgccacttcagagacattgccgcctcctaagagtggaagtaaatatgcaaatgattctatgtagcaaaacacagaaggtcccaggcagtatgtgtgccccccactgagttgggtcttaatgctcacagtgggggacaggagcctggagaggtccccaccgggtgagaagccagtcctcagtgaccggggccacttctcgtgtctgtgcacactttcagccacacgggtgcccccagccccaacccattggctggctgaagactgttgcggtcggccctgagctcactaatgagaagctggtgactgtggctgggtcacttgggttgggaaggccccctcctgagcagagcaggtggacagtggcggagcccactgtgatgggtgacagaccaggctgtggcagggtttgtaatagagaaccaagacaggggcatgtgttcaggaggacctggtggcaggagggggcatccaagtggcttctaagcagcagtgctgaaggcagggctggcctcaggacaggcagtgaagcccaggcgctgccccacctggaatgcctggctcagcctgggtggccaccgggatttgagcagtttcttcagctgctcttgagcagcacagaaagctctactggcagatagggctggacaaaaatgatgctaacttcccgcttggagcccagagggcaaggagggcttgggctgggttggcaagtggcttaggaatcaggaagctgggttccaccccctccccactctgcctccacagcaccagctgctgtgttaacatcctcagggcaggagcagcttctctcccaggcctcgcccagtggtacatgctcgcagcatggacctggacctgcctgggttctaagccggtctttggaggaggtgtggggttcactgtgcctggttggagcagcaaaccctacacccctgcagatggtagggtggacccaggcacaaaggccgtggcatcctgcagcaggagagccagctgcctgtctgtggtgggtcctctgagacggcagaggacttggggcatgaatgaaatcaccttgtcagggtctaagcagaatccccagctctcagagccccaccgtcagccagcgcctaaactatgcctcctgccctcagagggacccgcccacggagggactcatcctgccccagggaatattaacacgggagaagtgagatctggacaagggcaaccatgatttggtgactccaggaggtgggtgactgtgagctgtgagacaggcatcagtgccacttgctttgtcgagggtatcaagccaggcttcctggaggaggaggaggaggcattcgagatgggccctaagggaagccgagcatgtgaatgttgagcgggaggagggttcttcccagccacctagcagcatggcaagaggagggtaccagggtgggggacaggaccgtcatgccaaggccagaggtgcatgcacagccggcccacactccagggctgaaggctaagccaggcaggcgggagaagtcagggacaggagtggcagagtccacggaaggggaacaacaggctgaatttgcaagatttggctgaggctgcaccagtcagcagacagggtctgggtgtccaatatgacagtccagaggtcacttgccccaccgaagtctcaggaaaacagtggatttccactggcagatgctggtggctgcaagctctctatgcagctggcatctcaggatgtaatggagcagagcctcatattttaggggtaaaaaagggaaagagagaaaaggggtggggggatttttccatatggcgaaggttctcattaaaatcaattgtaaagttagctaatggctggttcatgtcatttggagatggctgtaaatatcagctgcatctatattcagcatttgaaatgttctattgaaagtctatgtaactctgtgagtgttttccagtggagtgttattcatttaaagttgtttgaaaatctgatcagaaagagcttcaacccggaaatttagtgatttgcaatatgccagcatctatgcgctcagcactcccgctcgtggagctcaggaaaggacacccatgagaatgttacttggtgtgtgctttgtgttttgggggggccaggaacgtgcattcaggggagtttctatttgcccaggaggattgtgatgtaaggcacaaggcccgactctggagatgtctggtgcatgggagtttgtgtggaagctggagttggccagcccctgccttagcctctgtcaaagagctggaaggatacgtttactatcggaatgcccgcatgcctgctgggctgatggcatcccataaagaagagagattcgttccacataaaatgcaaccactgtctactgccccaggaatggcccacgggtgtcgggggtgatgaccgacctcaggactaggtagctcccattactgcttggtggctgacgacccatagtgggattacttgggggattgcgttgctggggaattacttgcttgggggattatgaggcgggaaggtgtgccctccattatatagaggaggcaggttgaaaattgtattaggctgttcttgcattgctataaagaaatacctgagactgggtaatttataaaagaaagaggtttaattggctcaaggttctgcagactttgcaggatgcctggtgccagcatctgcttagcttctagggtggcctcaggaagctgacaatggtgggggaaggtgagggggtggggacagacatgtcacaaaatgaaagcaggagtgagagagagagagaaagttgggggcggctgtctcacactttttaataaccagattccctgtgaactcagagcaagagcctaatcatcaccaagggggatggcccatgccattcatgacagatccagacacctccccacaggccccacctccaacactggggattccatttaacatgagatttgctgggggcaaatatccaaactacatcatgagtgaattaggtagaatataccagcagggcgggaccgtgttatccatggagtagcaggccttgccttttggaatgtgtgcgcgttagaatcacctggggagtgtcagccccacttcacaccaccagaaatccacatttaggggccagtggcctggaagtcgtcttacgttttctgcatcccctcctgcccctctaactccacggcttgtgccaggaagaccctgctctgcacccactgccacacaaactcttgtgtgtttcaccataatgcagaattcattttaaaaaagtccttcccctaaagcaaactgctgaggctaaacagtagactcagagatgccctctctgcagctactaagaaaaagatcctcaaagaagcttctctctgctttgaccagcagcgggtacttcccaacactcacttaagtctacttatagcattttacaaatatgctcgtgaatcataaaatatgtgtatgcattaagcgactttgtggccgttttctagatggagaaagaaagacgagagagaagatgttcatgtttggcgagtgtctggcagaggtttaagagagcttggagcctcttaatcagaaacagagctaatcactttgcctaagattaagtcgtcctgggtgccttcccatatcttggtcctcagcattgatttcctgctctgagggcactgatacactaaattgtgaaactcatttttttccatgggtatactgtagaataaatatctggaaaattcttacattcctgataagatccctatagagaaagaatcccctctatctgcccctgagaactgtgaagctcgcctgctgggatcctgagatttcacagtaggccgagaacaccctccatccgcattgatttattcttgtttcctcgcctgcaaggactgtaatcaagcccgtgtgtttactgggatgtggttgagcttgctggctcttaaggatgctgagtagtaaactggggcgaggctcctgtcctgcagctgggttcctgggctgcccggtggtttggtccatggatcctgaacgctctctaatcaaggctgtgtgggcagtcgcctcaccaggtcatcatctctcaagggttaaccacggcagtgattggagtgtgtatgtgagtgtggccctcaaagaaaagacctcgagagttcttatagccaggcccgggaaggggattgtcccgcatggaaaacagtgagacccgatcatttcaatcgaccatacctcttccaggtcgcccatttccacttcataataagcttcatctggtccaaggcctagaagaaagggaggttaaatggctgagtctattaaaacatctgtcgccaaagccccactcacatcatgacctagttctacaagtgccagcttataaaagaccaaaagtaggtcatgggagggagatgaatggggcgaggggaaacatcatttcataagtagtcacttagaaatgttccaacaccggcacccaaagagtcactgacatgccagggcagcgtttccaggactcaccgtctcatttctcagtggtgcctggggacctacagcaggtggcccttgggggccgccgctgatgacaagcacgcacatcccaggagcacgtccattcctgactcttcgaggaagctcatggctgtgagcacaggaagtgaaaattcctgaaagaggaccgacctctcagtcttcacagggacatggatggatttgtgattgagcttgttcagtttgtgtgtttgtttgttttttgggccaattacaaattcagtccatgaaaatctgattgttaacagtaggatcagagcccccgtagagttttgtttttttccattttcaaagcacatgtgccctctaactgcaaagtgtatgaaggaggccgtgctgtcaatgagcagtgcctccctggaaaccttgtgggattttgtcctacaggtaggccgtccattcctccctttccaggcacacacagccagcagctgccattggccccttccatctggcctggagccctgtcctcctgcaggaggtctcagggtctggcccttcctgccccagggacttcctgttgctattgctcaggcccacgggctgtgatgccacaaggctgctgggcgcagggtggaaagggaacatccacggtctctgcaagctggccagcacgactgcgggggctaacttccttctggaacggaccctctgttgactttacacaatgttaacaaagggcctggggcatctgagaacttctgtgctcatctcatgccaacctcacagcaaccccacaggccacatccttgccatcctctccaggctgcagatggaaaccaaggcacagaaggcaccaggccgccatggcgcacggctgtgaaggaggaagccgggcccagaattccgtgctccctggtgttctagcaacaacattgctctctggggctttaacccatgccaccttccctctaagcagtctcacctctgaaaattgaccagttttcttttctctgaaacacaattttaaaaagcatctgacaaccacaacctgtgtcccaaggaagctgtaaccagctgcaggtgagaagcgaccaccccttccctagagtggaggcccctctggccacccactcactggacacctgtcccaggcaccacgggcctggcatctgagccccacagcatcttcccttgctccctgtcactgttactgaacccatctggggtccacttgcccagcacaatagagccaagcgtccacaccaaagtttcacagcgggagaaaggagggcatttatttgcagggcgccaagcagagagaatgggcaacgcccactggagacctgacctcctggctggcttacaagcaagagtttttaaaggcaggggcacgtctcaggaaggcagaagctacaggcaaaatcataaatcaatatgtggcttaaaaaggacatcttgaagtgagggctgacaggtcataggtggatccagcgattctctgatttgcagttggttaaggatttgtctaaaagcttgaggtcatcagaaaggaatgctaaggtctggctgctgggtatgactttcttcagacccctcaggaagaattttggaacaaaaaatgggggtcagggttcaggcctcagtccgccccccccgcccccccccacccccacccccgatgtctatgtgacagtggttggcattttctgtctggtgggggtccaggtttctgaaaaacagttcagggatgtagatcaagatgttatcttgggtttccatagggaacgaacatcttgtggttctaacttccttggggggctcttgttttaggctactgttcccttctcgcttttatcatgttactcatttacttctcagggctcgctgggtgcctggaatttcccttgaaggcactcaggattttcctttatttccatgttgcggggcctagcaggcccctaaaaggggtccctgccctgtctcatcactggcttgtcaaagggccataggcaaatacgcactggggctgaggtttgctggtaataagtacatggacatgacccttggcaatgcagctgaattgagaccaatagatttattgtgcctctcaaaacacagattgaatgtgggcctcgatattcattgtctcaagaacagctctggaattgtgggcaggaggatttagaaggtcatcactgtaatgttttctacaaaaggcacctgggcggcagccatggggtggggggaagggcccaggacctccctggaggcccagggcacacctgcctgcaccattgcctggcattggggcgggggcgggtggcacggctgggcctctgccctgcacctgaaaacaagacgccagctcttctcggtttcctgccaaagtgccaggcacagagcctgtcattcacgatcatgtagcgagttcagagagaagaaaactggaattttttgtttaatgcaaaatgtccttgcttttgcattttggcaaacaattgaaaagctttaacatctgtgggtggcccagcaccggcaggccctgctgctgtccatcaccatttgagctcccggttctggggactcccctgtgtggtcaccctcacgatgtggcctgggaacctgcggtgagcatacagcaggaacctgcaggtcccagattgtcagaaaggacgccgcagtccccaaaagctgcatgtatgataggggagcactgctggctgcacctgcaaagccagtgaggaccctcctgggctcatcagcttagatcctggttttccctggatgggaagggggaccctcctcatggtggctgcagaaggatggtgtggggcttttctcttttcccctctgtgctacaaaagctgcctgttgggagtcggttgtccctccctcccttccttccctcccaggtggccttcgtaaagatgtaattgacctgtggattccaccagttagaggtgtcactccacacagaagtcccaggcacaaatgtccagcacttcctggatgagattcagggctccggtgtagtctaccccgcctggccattgcctctcttttagctacgactgggaaggaaggctatgatgcccagttacaaataaaggcaaaataatcacgtctggctttttttgttcttgtcggaaatctactctcctagctcgctctctctcactctgctcttgttctctcgctctttctcatttgctcgctcgctctctgtttcccgcgtggcttgcccagttcccctggagtctatcccccccatcccgcagtctatcctgccatccctcacccctcctgcctggtttcctggctgctccagggtagaatgcagaacttctccagccccatcttcccctgggctctggaacgcccccccaatacgattccaccgcaggcaggcagctccctcaccacaggggctcgcctcgtgctctgcgttgcactggcagaggggcagcacaggacttaattctgcagccaggcccttgggccgtgggccggaggggacgctggccacctctcttaccctagaagctgcggcaggtgtccgccctggggactaagcaaaacagggacagagccaccggccccaccctaacaggagcaatccattcctgttcctcttcctgctccttccttacatcccgtctattaatgccatggtccctgagcagtcatgggaccaacatctgtcacacacatacagagcccccgtcggacgctgcatgagctcatgtgcatcacctccgactcctcatcaccagatgccgctgcggcttccattttacagaccgggaggcagagccccagaggtcaagccagatgtccatgttggggagtctaacggcaggttctcaccgccctggaaactacatctgcctcagacctgcccccctgagtcacagcatcacagaaaacagtttacaaggtcatctggcagaaagctcagtggctgagctattttaaagcaaagtatcagaccctcagagaggccggattgattgtaatagcacagggctgcagcacaggctcagggtgcaatgtcaaaccgcggccctgcccgagagcaggcactaaaaataaccaggctccgttcccaggtcagtgagtgtcggtttggcgatcacacttgctttcttcttgggaacctgggctcgctgtccacacagcccctgctcccctactccctggctcctcgtcctagcaaggagctccaggcaccctcagcctgtcaacttttcaactcctccagcgagtcctgtgtttgtaacatggggtgttttcaatgtattgggatgtcatgcacgccctgaaaaatgcaggcatgattagtacccaaccagacagctctgcacagactgcagagcccagtgtggccagcacccagcttgagtcacactccatctgcccttccagaaagctccctcaggccccttgtggccacgatcccttcaccaaagggtaaccagattcctgtattccaactttctagatgttgcctgactttgaacttcgggtaaatggaatccctttttgtttttagaaatgagatctcactctgttgcccaggctggaaggcagtggcgcagtcacaacccacggcagccgccaactcctgggctcaagcgatcctcccacctcctgtggggctgtgtagctggggccacaggtgcacaccaccttgtgcagctaatttttttactttttgtagagacaaggtctcgccgtgtttcccaggctggtctcaagtgcctggcctcaagcaatcctcccaccttggcctcccaaagtgctgggattgcaggtatgagccaccatgcctggcctatagacttttgtgtctggcggcttttaagagtcagacttgtttatagtccccccagtggaggatgaattcaagcacaattcctgccttcttcactcctgaccttggaacttggcgggtggctgagccccttgagctgcaaagtgaggagaatgacggcagcgccgctgtaggaccatggagggaatgaacaaggaggggttgtcggacgtgttcaggacaggaacagcacactcaaggtcaccattcgtcttattcttgtcagctattatatgtctgattttatggttttcatcctgaaatacgtggtcagtccagggttcatcgttttagctgagttacctcttatttcatttattctcagttccgtcccatgcaggtgcctcacaaaacccatatacccctcagggtccctcccccaaatgcacagacacagccagacagcttctggggctgattgcccctggatgggcctctcgtgtggggctggggcaggagctgcctgcctccccgtgcggggaggatgcctcagcccaggttacctgatcccttttcaggcgctattttccccatgcagataaggccctcagttttctaaagaatttgcaagaaatcatgacgctactgcaagggtttagtgctcattcttcactcactgtgtctgggacactaggtgggtgtttattctgccatcatccctttatcgaacaccaccagttcctaggacgaggaagcccgtgcctctccacaggctgactgcatggtggtggtataattcccactataaagtggaggactcccaggtgcagagatgggctcttaaccacctcttccctatgctaagtctgttccacctaaaggaaaggtacgttatcagataggctggaatttggccaaattctctgttatgatgaggctgtccatcatccatctgtcatccactcatcatccatcatccgtcatccacccatcgtccatccatccatccttccatcattgattcatcatccatccatccgtccatctatcatccatccatctatccatcattcatccatcatccttctatttgtcatctatccatccatatatcatccatccatcatcatccactcatccatccatccttcatccacctaaccatttatccatccattcatccttccatctatcatcctttattcatccatccttcatctacctatctgttgttcaatcatccatccgttcatccacccatcatccattcatccatccattcgtacatccacccatcatccatcctttcatccatcattcattcatccatccacccatcatccatccattaatccatcattcatccattcatccacccatcacccattcatccatcattcattcatcaatccacccatcatccattcatccatcattcattcatctacccacctcattcatccatcattcattcatctatccatccattatttatccatccatccatccttcatccatccattcatccatgcattcccaggatgcacactcatgaagccctgtccaccaccccagatgggctttctgtaagtcgctgagtatgaccatcacccctccagtggccaaagcctagaagccaggtgctttaatggaagtttccaccacaaatttctggacccttggcatcccattcacagtccgcaaggaagaagggcttaaaagcttaataacatttgggaccttcataggatgatgtgtgcctctgtctttgaaaactgacttcaatcactcttttaacacttaatgacttctcagaaaatttgatgtctccattctagacatgaagcagtcatttcccagcactgtgtttctagcctctgggctttggttttatacccatggattccagtctagaggcagctgcagcagctgcacatgcaggtgccggcgggaggtcctctgatcattctgtgcaaaagcctttttgaccaaaggagctacatttgttgtccttccatcatgcttaactccttaagcctcacggtacattttctccaaaggcattgtgatgtgacgggtctgtgttcaggctccccaaggaggctccctggtgccccgaccccgaggagggctcatagcactggccaggcagcgctgcctctcgggctgctgcgccagcatcgcagggcgattaccctgtgctgctctctagatgggtgtctattctttcgttgttccttaatcgaatgccactagttcctgggcgcaggacgccagtgtgtcttcacaggcagactgcgtggtggtggtataatccccattaccacgtggaggaaactgaggtgcagagatgggctcttaacctccacttcctcagggccctgaccgctgtctagaagggcctcgtcatgcccacctgagacatgactgcctcgcattagtggtgcccgccgactctgcccaccaactgctgggccacatgggccctgttccccgaaaggctcagatccattgtatgagattccccaagaccctgctgacacacagacttgcgtgtgtcagtttctaggctattgactatccattgatctgcctgcgggtttctaccaagcatcttctttgggaattattctgcccagtgctggtgagtgggcatcaccagcagaaatgcccatgtccatggagacaccaactcaacccatctgatctgtcttccagtctccaaggcggggtgatagtagtacctgcatctgagattgttgccaggaggccgcctgtgtgggactgtctgcagagcccagcacagggtgactgcccagtcctgctggtgctggaccctgagaggcagtgctgcctaggaacccaggctccagaaccacacccttgggttgaaatgccacatccatcccttgatagctgtgtgacctcaggaaagtcactgagcctctctgtgcctcagtgtcctcatctgtgaggtagagataaccccgatgccttcctggaggggtggtgtgtgtgtcaagggagctgtctgtcaggccagcgcttagcacggagtgaagcaccagctaagcaagtgagggctctggcattgctggttgtcaggctgaccaggccctgcctatggatcaggcaccaggcttggcatttggcgcatagtttcctctttcatcctctgagcagctcagtgacggtgatgcgggtcttttccttcttctgagcatcgggagggaagcggtaaatcagagtgcacgccaaggcttccaggccccggatcctgaagacttaacaaccccccgtactgcttattagaggtctttaacctgaaggagcttcagtcttgttgggaaagcaggattataatcatcccactctggcaggaaaatgaagggaataattcagagttcaaacaggcaaccgcacttagtgggcgaagggagcaaacccaggtcagtgcagctctgcgggggtgcagctccaggggccttgaagggcgagtagaattgaggttgtggtgggaacacaggagggtctcccaggctgcaggggggcccgcacccacctccttattaagaactaattgtggtctgttctgatttgaagatggctagtgtcttttgcgatcatcccatcagaaaggacttctgcttccctctttgcttaccctgacgcatttgtgatgatgactaatttccagcacgtgtggagggctgcatatttctgcaagtcccgctgcttctgagctcctgccagataggcccattgggagcgggtctgtgctcacagcctcctccagcagtgacaggaacggcctctgagaggaggggcagctagacagcaaaaccaggcaccgttttccaaagctccatcaaatgcatcacttggggagtatattttaagaggaggagagcgagtttgtagggatcgtaagaagatgggaggcagcgtcagccctgtctctcttttgctggaaggtttacaagttgagctccagctccgtgaacaagcagcagtgagaaccgtgggacggcacaccacaggcttcactcactcactctccagggggccgccaagaaaaccagtggtgcccccactttacagaggagaggctgatgtgcagaaacctgaattcaacaaggtcgaggagtcactgggatttgaacccaggatctctggttcatgagcctggctgaaactagccatcttcaaatcagaacaaaccacaattaattcataataagaggggggtgggtgtgggcccccctgcagcctggaagagcctctcaggatctctggttcgtgagcccggccgtctgtatctctctgacccaggtttggtgatcggcccccactgtgttgccaacaggcagtgcaacggccggcctgtgctgattttagtcgcatttcctgttggaggtctgcaagcattgcgggccaccttgctgtgactcatggagtttatcttcctgccacaagtgagcatagatcttggtgtaactggttgaaggtccgcttattaattcccatgcatttgccaagagagcgcagaatcgtttgtatgtggtgagagtgaagctgtgtcccgtctgtgggagctctcagagattcgcaggccttctcctgaattcccacctggcctccctcgtgacagtggcgtgggctcctgcttcagcttggcagctccctgcgtgtccacctccgtcctctgaggtcctcaggggcctccagccaagcctcgctgtgataccccctcacccctagcttagccccggacccagtgggcacgtggagaggccggatcgggaaccccccaagccagtggagcgggtggggagggatcccagaccccaagggatggggccagatttcctcccaaacccctccagccactgaaaactgatgcatgaggaatagccactcgtgacctcggtaaccatgtgtgaggtgctgcgccgtccctgacaccaaatgtcgcatccattaacgtttaattcaatctttttcaatatcacattacaatgtttccatcttggaatggaatggttatggttagcataaatctgccacgtacacagagacttcatttatattagcttttatttaacttagtaaaaggtaatttgtttttattaattgattcattttccccccagccaggcaagcagccccactcggaactgcacgcacggcgcagtccgggtgggagccagcgctgcccttgttcacccggctgcgggctgttgtcttccgcggaaatggccgcgggctgttgtcttccgcggaaagtttaattgacggcccggtgccggtgtggccttattatctgctcctctctcccttcggttttttatttttgaagttatcctggccagttgattagtctaacacttactaccgggtgggccggagccctctgcagtgttctgctgtacacagagtgcagggaaagcacacaaagctgccgacacgcaggtgcatctggcagtgccctggcatcaggatgtggcctgcagaccagttggtagctccatcagccaccggcctccaggagcagaggaaggagcaggagggagggtgccagggaaggcaacccacaccaggtgacaggcggcatgcatcctgctgtccagagctggccagcactgtccattcactgcccatcctccatccctctccctagccacagaggtgggaaggcggctccatgccagaacggtgcctcagtttcctcattgctgctggagctttctcaccatcaggaggcctcatctcaggccacggcctactgatccaggcgactccgtctttgggtggagctgcggcactgccagcgggcccacgctggtctctgctcgccggtctctgctctcttgtcaggtgaccatgcgtttgccacgtgtgatgattgcgtggcatggcgtgctcctcgcacgcacagacacacccttccagcattccagcacaacacagagaaggcatttgcctccgtcattccccgccacgtgctcttccaaaaccttccatggaggcctcttgtaaatcttcctccctctggcagcctcctctcagcagcccaactttttactaaggttcattctataaacaccagggcagattgcagctgtcgtgcagggcatgcaacagaaaacaggcccggggctttctcccagctactttcctgggggacggatggccacagtggggccaggagggcaccacacgcttccgccgcccatttagggaagagacaccacccgtctgcgtccccgaccatcagtgtggatacctttgcattcgttattcagtaaatagtgagctcctttcactgccggggagacccctaccctctccaggtggagttgtaatgccaagtttttctttaccaaaaaagtcaaattaaaaatggctaaacagtttctaatgactgtagctaagagctatttgatggacaacacccgccactttgcttggatggtgttatataaagaagcaagatatctgacgaattcacctatatctacccattaaaagacccagaagccacttgtgaactgtagggcttcccaaaagcatggcagccgtgactccatctgtctctaaacatttacctggggaatgctgtttattaaagctatgggagaaaacccacacaactaaactaaaatcccgagcttgctgtggtccattgggctgctttggtttatgctgctggggttagaggaacattgctatggaaaggtcctgtttctacctggaatgcttccctactggagacacagtcactctcgagtcatttaaaaatacccaaaggagggcacgtgaaaacccggggaaagctggagaagacctggacctgcagaaagcctggacacctgcattcgtgcgattgtgtcggcatcctattcccgcattcaaccgtgggcttgggtcatgatgcatgtcgtcagcagaggaagctgggtgaggagtactcgggactctctgcactaattttgcaacttctatgaatattacacttttttttttttttaagacagagtctcactctgtctcccaggctggagtgcagtgctgcaatctcagctcactgcagcctcaacctcctggtctcaggtgatcctcctacctcagttccctgattaactgggactgcaggcacatgccaccaagcccagctaatttctgtattttttgtacagatggggttttcccacgttgcccaggctggtctcgaactcctgagctcaagtgctgcccacctcggcctcccaaagttctgggattacaggtgtgagctaccacacctgaccaactgtttcaaaattaaaatttttaaatgcatttttaaattccattctcattcattagataataccattgtagacagatttattgaacaaagtttccatgcccttgaacaaaagccagaatctcatacacagaagtgaccactcctcaccctgtccacctccaacatctttcatttaaaaaaaccttctttccactgtgaacatagacctgtgtgggacccaccagctggcttcaatgccagcttttcattgccaagtcagaaattatgcggggcgggtcatcttctgaatgatctctctgttgtcattaagctcaaatggtgcctttgccagaccttgccaggcatgattcccgggttttatcctaatgcccatttgctcagtcatcccccctataatttagctcagctggaaggttctggtgactggagaccaggctggaagagtggaggtttggacagggaattgagctgcctgtggttttggaagagcttccctgggagatttagagaagccccaggagaaagagggtcaggaggggctggattctgcagcacttccttgggtttgcccagtgctgccctggacagtctccatcactcagggccccccaacaggctggggaagcgggctgtgctcacctcctgcaggcccctcccaggatactgaggatgcatgcggtgagcagggtctgtaggctgctcagccatggccgtgaacccaggaagtgttgccttcccatccaggagcctctccagctaagccccctccagctgcagaagccgggacttgctgaactctgagagagcaggaggggaaacggattgatcaggtagctgccgtgtgctcggctctgtgctgcggctgtacccgatctcgttttctccttacttactgttatgttcttattgattagctgctgtgactgagaaactcagaactcccagggattctgcaggtttctttccggttcatgtcacagacccctgcggctgccccttgcctatcctcatttcagggaggaagactctctctgtcttaagtctcccagctgctgtggccgggccgggcaccgtaagtcctgctcatagcccagagaaaagcggagccaccgggaaggaaatgccatccccactgaccctgtggggacagctcagcgttggtggtcagccaatcagcttggccacaaagttagccctttagttatctccattttacagaagaggaaacagaagttccaagaaacgagttatcttgcccaagaacacatggtctcccaaaactcatgcagtaatgacaacgtggctagtacatgggtggggacgtggacactggctgttccttccgagtctctatgggtccctctgtccctctcctgctggtgcccctccccctccccgggtggttctgtccagcatttcagaagtctgcccaggcagaagcaggaggattcttctcttcgtagggataaacacgacccgcctggcctctgtatgagtcaggatccaaggacttaactttatgcagaaggaaacgaagccctttctaaaacacgagtcccccacccagccttcctgacatcctcggtggaggcagcccgcccaggtgagtgccggacccctcacaggagcaggatgtctcctccgacgatggactcatgtttatataagtctaaaaaagaccacatccctggcttgtttttttttctttctttttttttaatttattattataccttaagttttagggtacatgtgcacaatgtgcaggttagttacatatgtatacatgtgccatgctggtgtgctgcacccactaactcgtcatctagcattaggtatatctcccaatgctatccctcccccctccccccaccccatccctggctttttaaaaaaaatattatggggcaagtgattgatttcatgattgttggatatgagtgatggggagactggtttcagtttcatgattgcagttgtcatgtttccgaacttcctaaatagagctttatttttaaagatcctacagtcttacatcaagttaaaaaggttgctgtcaaaatcaaatggcatgtcaattttaatgagcaactgaaaaattaacaaatgtaacgttctaatctaattatgttctttcggaaagctttttgaaaattgattcaagtttgatatgtcaagcgttctaccgccaaggcagcagtgacagtgtgtgggagccccgcaccgggaccttcccgacggggctccattggcctccgtggtgtctctctagctttgggattacttgctaacgctgtaaaacttttcatgaactacgcgcacatacagagaaagtgaacagattgtcagcctacccctctgcactttgacaagagaatcacaatcagtaaccagcgcccaggcgcccctggcaccctccctaacctactatctcccaataaaggtaaacaccagtttttaaacataagagctttttttttttttgaggcagagtctcactctgttgcccaggctggagtgcagtggcaaatcttggctcactgccatctccacttcccgggttcaagcaattttcctgcctcagcctcctgagtagctgggattacaggtgtgcgccaccacgcccagctgatttttgtatttttagtagagacagggtttcaccctgatggctaggctgtcctcaaactcctgacctcaattgatctacctgcctcagtctcccagagtgctgggattacagacatgagccaccgcgtccggccactatatttttttaagcatagcatctgtgctttttaagcagggatccatgcagtgagggaggagaacctctatcatctgaaagtctgttctgttcaatgccccatgtggtttgcaaagcatgcgtgctgttttatatgtttcttttaaaagatggggagagggtcctgtcctggtgtccccagtgagtgagggccttgtggagacgtctcgtggttctggtttcctccccttccagaggcatctcgggtggtgtcctactgcatgtgtgccacgccaacatgacaagacggtctgtcagggcagcagcactgggcaggagagctctgttcccagaacccggggcaccggcgctcaccctttccgcatcttgctctggctttggttttgagagtggtgatgtcccattagtgcccctgacactttggacaatctacgcagcattattccagggtatagagatagttaaagcaggcccagctccttttcttaaaggatttactgattagctggaaaacaggtaactttaaaaaagaagaaaaaacaggctgggtgtggtggctcacgcctgtaatcccagcactttgggaggctgaggtgggaagatcacttgaggccaggagttcaagaccagcttggccaacatggcgaaaccccatttctactaaaaatacaaaaaattagctgggagtggtggtgtgtgcctgtaatcccagctactcagtaggctgaggcaggagaatcacttgaacccaggaggcggagattgcagtgagccgagatcatgccattgcactccagcccgggtgaaagagcgagactccctttcaaagaaagatgagaggaggggaagggaggggaggggggtggagggggagaggaggggaagggaggggaggggggtggagggggagagggagggggagggggagaaaatacaggctgggcacagtggctcacacctgtaatcccagcactttgggaagtcaagacgggaggatcacttaagcccaggtatctgagaccagcctggcaacgtagaaagaccccatctccacaaaaaagaaaaggaaagaagagaagagaaagaagttagatggaaggaaatgcaaagtccccagagagggggagaagaggagaccaaagctgcgggaatggagatgaacaacgatgatttagataggctggaaattgccctaagatgaagctggaagcatggcggggttgcatcctgggcagtgcggggcctggctgctctcccgtgtctggccgtccttggaaggggaactcgtgatgatcttgatttttttttttttttgtaaccagtgcaccgcccttgtcccttattattacagatttcttacggtccatagatgacattcactgatgtggggaattagacattttagaaaggttcccaacagaggccaaagcaggaagggttttctggtgaaatgttcggttttcagtcagcctggagtatttcgttcctaataaagatctaatcacagagattttgggtttcaaatccataggaaggaatgaccattttcatggtgagacattgatatttcattcctgagacccaaagccacctttgtaacctttcaagatcctttttgattgtgtaaacttcagaagtctggagatcttagatatcaggaagataaatttacataggtaagcaccataattcttgttcctcatatattttatattgcatcatttacataggctttaaatatccagtgaattgtaataaatggggaactcataataaaactggtaataaaatggattattcaggtgatgctgttttattacagtctcattatgattatataatccttattaaaatctggaccaaagatgaatttctcactggaggcgcttcacaagtactttaataaattctatttgttgcacaatcctggggtgaatgttggtttttataatttcatacaaatgtgttgcaacatgccatggaatctgactataggaatctgtgcagtgaggaaagagaatctctgtcatctgcaggtctgttcaatgcctcgtgtggtttgggaattatgtctgctgtttcatacgtttctgttgaaacatggggagaggccctgtcctgtgttcatggtgagcgagggccttgagggaacgtcacatgcctctgttttcttcccttcctagaggtatcttgggtggtgtcttcagaacttctcgttcttgctcaaggttcttttattggaagagctgtctgatgggtggaacacactcatcagtgtaatttttcttttcttttcttttttttgagatggagtctcgctatgtcacccaggctagagtgcagtgccacaatcttgactcattgtaacctctgcctcgcagattcaagctattcacctggctcagcctcccaaatagctgggattacaggtgcctgccaccatgcttggctaatttatttgtttttgtttgtttgtttgtttgtgtgtttgtttgttttgagagggagtcttgctctgttgcccagactggagtgcagtggcatgatctcaactcactacaacctccgcctcccaggttcaagcgattctcctgcctcagcctcctgagtagctgggattatagggaaccaccccacacccggctaatttttgtattttagtagagatgggatttcaccatgttggccaggctggtctcgaactcctgacctcaagtgatccgccccttcggcctcccaaagcactgggattataggtgtgagccactgcgcccggccagcattatgtttgatcttagctgttatggctgttgccccagtggcccttccttagaatcctaccctgacacagtctggggccttttggtcttgactgaagctgtacatggcagagcagagtcacgctgagtgactctgccatcactgtggtggagggatgccgtggcaaggggaccctgcacggcatgtactgggaagtagcctcttcccctggctcccccagaaagctctatcaggctggatgaaagccagagcaagccagggaggcagtcgaaggagagtcgcagaggccctcggaaaatagagaggcaatcagaatgctttggctagaaaggggctgtgtcagaagtgtttgatgccatgaagtagatggatctgttaccctaaaccgtggatgctggatccaggagtgagggctggggagcaggtgagcgcacaacagaacgagtgagggcagtcctgccctcagccagatccagcattagagacaagtatctccagcctcttgcagccttcttcactgttttatccatagctgcagccacagcgctgtccagggaggaggtgctgaatacgtgttggaaagaatcagctgctccgaggccctggctgtcaggacaactaatatctatgccaatagttcatctctaggcccccagatgggtgggccaagggaaaagcaaggctcaacagccttcaggttttggaaattcggtacacagagctgctgagggctgctgagggaaattcggtacacaggcaccagagggagaccttggacctgacctgctatatttgagctctccagctgggtggcctcctcttgcctcacttttcttatctgtaaaatgggtatagcaggccaggcatagtggctcatgcctgtaatttcagtaccttgggaggccgagacaggtggatcacctgaggtcaggagttcaagaccagcctggccaatgtggtgaaaccccgtctctactaaaaatacaaaaattagccgggcatggtggtgggtgcctgtaatcccaggtactcaggaggctgaggcagggaaaatcacttgaacctgggaggcagaggttgcagtgagccaagatcgtgccattgcactccagcctgggcgacagagcaagactgcatctcaaaaaaaaaaaaaaaaaaaaaaagggatttagcaaaaggatttacttccatttgttataaggtggaatgaattaatatgaaagagccgaaatgtgtggcacatgaggatgtgtgttgtaaaaagctttgctaagttaatttaaataaatattttctggatggcattcacggaccatccctgggggtgggctggagggcagcgccaagtgcatgcgtggacatggatgcagcacggtggagccccagctggcaggggccacggattggctttgagatgaggccgggatgagtcatcagcctgacgcacaggcctggagcgagtgctctcagaatgcagactggaaattggatgtggaaactcacttcgaccaacaccggttggggaagcacaattttaaaagcaggatttagataaaatgcttattagtaaagtgaggattatccaggattttaaagtttgttcttatcttctgcgctgctcaagtgaggaaacgaggtggcttcagcctgtggtggaggatcctcagctgtggaaagcgtcggccagtctcatagaagtggcgcctgttgccggccctcaggctctgccactgaggaggagaggcggataaaacacaggtgtgagcaagaccctaagaagctgctgccctccgtgtcctgactgtgtgaggacacactgatgacaccatccccaatcgcctgcagggcatggaccccacaaaaggggccacccaggaggcacccaagccctgagcaccgtgagtttgctgggtttttctctctgtcccctgcctccaggcgggactgcacctaaactaagtcatgtcctggtttctttgttcttctatggtcttcacacatgaaggaggtcccatgtgtgggaccctggcaccagttcaacacgaggcggcaaatgtaaaaatggagccccgtatgaaaatgaacctcttcggtttcagaactcagagaccctgaaatctgaccccactccttatgtcacctgtgactcatctttaaaaagacccgcatctcaccaccgttcagtaacaacaagtgcacacaacagaaaacgatgagtaagtggacaagggatatcagtgcaaaacacacaagcaatgcaagcagcgagtctgtgaaaatgctctcctgccccagaaatcagttaaaagcaaaccaaagcaccacgtttctaatctgatcagccaatgttttaaggtttgatgtgaggtggagcaggctctggggagacgggttctctggccgggttctaggggagattggggaaggtgttttggcgggatcagtaggtatgaaaggcatgtgatgagttttctgtgtcccgtaaccagttcccacaagcgtagcagctgaagcaacactcctctgtcttctcagagtttggcaggtcagtgtggcgtagctgggctctctgctcaggtctccctgcgatgcaatcaaggtacgggccggggctgggctgtggttcttatctcaggctcagtttcactcccaggctcactggttccttggcctgctttccaaatggcctcttctgcagggaatgccagctggtgtggggcagggggagacagcttcaaggtgaggaccctgagagggaccctgagagtgaaagccgaggagaaggaagcttggagcaggcacagagaagaaggggacttgggttgggggtgactcaggccactgaactcaaggtgggagccaacctcaaggagatggagggatccacaacagccagtgccacggcccagacaaggagtggcagggcgatggggggcaggcctgggcacggcaggcggctgggcgagcagcacggggaaggatcggacacccaggactgcccgccaactccgagcctgcaggggcccctggtcaagtgggtgtggctgcaacccgctgatgtaaagctgcgtcgcccaagtcctgctgcagaggcagctagagctgtgctcgtctctccatcccttgtcctccctagacaggaaagacccgcgtggcctgagagggcagggcatgcctgaggaccggggctcagcctccctggcggggccctggccggggctgctggaggtaggagcactgtccctgccttcctctgcccatgaggggcccctctggctgcctcactctgcaattagagctacttcgggtacaggggccattagcactgccgcctcctgcttcatggttgcacaggtgccccatgagactagatgggcccccactcttcaaggggaatagatggggtgagggcgtggccatggggagcatgggctctgcagacctcgcatatatggagcctaattacccacaaccctggtgggaaggagggagccaggcaaatgtgtttaaaacctcaatatgggaccaaagatgcttctagaaaagtaaccccaactcccacagaagcatctgactctgcagcctccccatccgaactgtagttgggaggtgcttcttgccattgcttttgctttcagacaggaatccccacctcctgtttagagagataaatggactgaatgttaacagatttgttccattaacatattcggcaataggcaggcatgagatagcataactcaatttctatcttaaatcattgttttaatctcacacttgaatatcatcatttaatttgtacatccagctggaaatattgatttttggaggcatttattctgtgcattatgtaaaattctatttgcactctgctatggaaatattactttgtggcttaaaatatgattgagagtgttccattttttcttgtcatgtctcatgcagatgggacactgtggcttcgctttgcattggggagggtatcggggcaggaacgaccacacggggcaggaggatggtttgctagaggaggcaaagaaaaaacactgtgcaatttgctggtttccatgactatgcaactcgtaatatgcattccatatttaatacacttttttaaaggtggtaaaatagcaaatcacaggctcaccgccgtgatcggaggctgagagcctggaagagctcccagccagctgtctgcaggcacctgatgtgggagggcacgggaccgggccggaggctgaggccttgcggtgttgctgtcctctccttctgcagggatcagattctaagtggtggttttttcttttctttctttcttttctttctttctttcttttttttttttttttttttttgaggtgttttcctaaacttgtgccagctgtgtggtcaacccgacggcctcccttgctgggacgctcctttggagcagcctctggtgggacagtggcagagatgcctgttcatcctcaacccgacggcctcccttgctgggacgctcctttggagcagcctctggtgggacagtggcagagatgcctgctcatcctcaacccgatggcctcccttgctgggacgctcctttggagcagcctctggtgggacagtggcagagatgcctgctcatcctggatccattcagaagccagccctgctcacttaaagggacaatcaaatagatgaattccctcctcctggttaatacaaacctttgcagactcatgtggaggttctgtccttaaaaccaaccattccctccaaggggcatggatgggtggcgctggttgagccctcaccatagttgatctactgaaacctgtgactgggctgggcattgccatgactgattcctatttcacaggcgaggaagctgaggctcagaagtgcgacctgatgacctgtaacttcagtggcagatccagtagtctcgactggttcccagcagccctacagtggggcaggctgagtcaggtgcagaggtgccctggccaaggggacagccccggggcggccctcaggctcagcctcgtgggcacggatcccatccccaggcccacggaacaaggaagggcctggctcttggaaaacccaggtccatttgtcgaggcagttgctgacagagaggaaataatggttgtaatgtcaagcttggggaaaaaatcaatttgtagttttcccagaaagccttttaagtagaatgtttttagaaataaattacatatgggaaagtcagaagcagtgacataatttgtggggcctggtgcaggatgaaaacgcgggggccttcttcaaaaagcattgggacttcccgagggcagcagcagagcattcacctggtgcggggcccttctgagagggggcccgggctgcatacccctgagcctccatggggagggtatgggggcccttcagtgccggtcctttgggcgtttgaatcccctgtactcgcccctgagccgccatggggagagtgtgggggcccttcagtgccggtcctttgggcattcgaaccccctgttcccgctcctgcccctttgcactgtgctcctctaggttagacgccctttgggtttcaaggtggcaagcaatgttgtgcctagctgggaatctagccacatcctgaaagattggggtgcttacctccctcagtatttcaacccagcagaccccacactgcctgcttccactctgcacttcttatggcattaggagtgcccccggagccccaccagagcctggaagaccatgggaatggcccagtgagtggcccaggctacctgcaggcacagaacccggccaggccagccaggcccaaaccagccgcagggaagggctctgctcggagaagcctcactgcctccctcgtgtgttccacgggtgcaacaaacacatctcagatccaaagccgtggctcccctcctgccccccgaacccagaagtccctaagcacttgggaggctctgccaacagggctgagggcacagacatggcttaactgggaagatggatccactgggtggtggtggaaaggaagaggccgcacccaaacagaacaacccatggaaagttccatcatgagacaaatgataatgttcatgattactaaggagggaaagaggaaggggagggagtggggcagggagggagggggagggagaaaaggctcgtgggcattgataacccacgaaactcaagccaggcccctcaccccttccgatgctccccaggcacccccattgcgaggccacactaatacggtagaggaaaaacaggactctatgatgcattgtctcacgaaataaaagaataactttaattagcgtgtctgaccgcagcattattttatgtgcatacatacgtctaggcctacatacatacatatacacatacatgtctagagacagcttcggttgccccgtctgggagcagtgccctggcatctggtgggtatagtttggggatgccgctacacaccccacagtgacgagaggaaggaaggagggcacagcagagagctggccaggcccagtgtgttcagcgcaggggctggccctcccctccagagaagaggccggtgggtcccaggaaggccctagctgcaggtacaccctatgctccagtgcctgggagtgtctggctcaagacggatgggtgtgaatgaacgaatgaccaagtggacaaatgatgctctgagcacccccagaaaccacttggagactcagtgtcccctccctgcagggctggtagacaggcgttcactggggatgccaggcgtcatgccatttcacctgtttaaaggctgaggtctacatcattgcttttgactgttcactttctttccccctgagctatctgctgctgcctttgtcacatggtacaatgtgtcagtggaattgttaaaataatttttcttagggccccttagaggtctaatatttgaaatccgacattttacttatccttcattgcttgcaatttttctctcctcagtagccattgtgtagagaagcatcacacagcactaaccaggtatccctgccctgagaagagagggagaggctgactgactgagcacgtggccggtgatgtgtcccaggtcatcagggaggcccaggccagctcgggagggcagggagctggggaccgcaacctcacagccaggtgccctcatcaagagctctctgcctaccactttctccacggtaaacataaaaagaagacacaaacctggaaggaaatcgccctaccccggtctagaactcaaggagccaggagtgatttagaagcagaagcgggcttcgcggacaggcacgcactgccctccccactcacgaggcgttgtgaggggtgttttttaagccattctcctccctttctgtgcagactcaaaaggcagatgccttgttgggagttaacaagccgggtctttcaaaggagagcttgaaaagcctcattgagttggaagccaaggggctctggagttagactaggagagaatggtccccttgagtgacagaaacatcacagcgccatgaaaggggccgagcgagtcggctgcgtggcctgctgtctccagttcctctccgcagtgtctgcatccctgggaactaccaccgggtcatggtggggtcaggccaacccggccacattgctatgaagaccaagttctcccacttgtttgagcaatagtgagcccctccaaacccctaggctgcttaattatgtacaaagccaggcccccggcctgtgaggaggtgcattcacacaggagctgtccgagaggccaagttcaagtccacccaaagctgtattttccaggaaagcccacacacccatttgtctgagatatgtggtgggcacccgttttccatgggctttcctttgaacctcttctggtttgagcagcgttttctagggctgatccagcagtgtcctttatccctccagctgtgcccgtcactctgggagaaggacacctgccatctcccctccccaggggctggtgcaccagagattggtaggagaggaatcgcatcaagtcaagaggtttactcacagacagatttgttctgctctgatacacaaaggacagaactaatatccatgccccaacccagagccggaaacccaggcccccactcctgacctcatccttccctcctctctcctcctactctgtgtactttcgcctggccttcctggagccaacactttaacatccgcctgtccctgctggtgcctcctgggtggatgcagtgaggactccttcccaggatctggtacctcctgcccctcgtgcgttcatgggaggccatgtggctgggcacagctcccagtcctccctgtccccaggagggtggatgggacacttgctcccactattcccactgggtgcgactgtccccaggcctgggtcacatcgtgatttgggggccacccccatccagatatgccacttctcgtctaatcagcacatacttgctggctccctgctgcaggccaggcatggggctgggcggaaatgctaatggggtcaggctcttaggaggctctgatgtttgtgcagggggtggggaggttgccccagggcaccgtggcttcctgcctgatgccaggtacaggaggtggcttgggcctgggttgtggccatcaagaaacctgcttcggtctctgccgctggaggcaggggaggaggactaaaggaggatcccagggtttgggatccacagcagatccgcagcgggtcaggtggagggggaagggaacttgagatactccacacgctctgctgctgcccaccgtggccggtgcacccacggccctggaggagtccccaggagtgcacagctgcctctggcctcctgttctcagcatcttctcctcaccttgctttgaagcctctgggtctcacccagccccagcttacttcttgcatgggccgtgtccacagtgtaggtgtattagtcagttgggaccaaccaagcaccactccttgggggcttaaacaacagagatttattttcttacaattcaggagctcgaaacccaagactaaggtgtgggaagagctggcttcttctgagacctctctccttggcttgtagatgccatcttctccctgtgtcctcacggagtcgtccctgtgtgtgtgtctgtgtcctcacctcctcctcttataaggacgccagccaggttggattaggccccaccctaatggcctgattttgccttaaccccgttttaaaggcccagctccaaatacagccatgttctgacgggattaggactcagcctaggaatccgagttgaagttgagctcaagctgttcagcaaggcagccacagagcacagtctgccctgggcagtggtccgccaagcattggcttggggctcctggtggtgtcccccccaagccctgctgtcacaggacgagagggagcagagcagggacacgccagctcttgacctccatggcttctgcgcatattcccttggccggagctgagcacatgactatgcctctccagagggtcttgccgagtggatctctgtgcacacaggatttgaaagagagtgtttggagaactgtgtggactctgtgtgctcaccacattccctgtccaattccctcccagcttcccaccgttctcctccccgatgcccgcagcgttcagagcagcctcacctgggaggcaattcgatccgattggttggtggtcaggtgtagacctgagggtggagggggagcaatatgaagagggctgaatagggtgcatgcaccgtagctctcccaggtcctcctggagcagggcctggcaccacatggacactcgacaaacctgatgggcggacgaatgcacggcagcgtcgtcttgatccaattttagaaactgccgttaggaagacctcatatcacaatggaagaatttcctttattgaaagaaaaaaaaattacctatgaaatccagccaaaaatgtatcctttgacatggttcttgtgctctagaagttggaacagtcttgaaaactgttcatgacggcaccggaagccatgtttgaaagggatgacctcacatgataggagggaagtgcccagatgttgatatctgattcctggaaaattagctcacctgtcatcactgagacaaggtggtgccttctgtcacataacttcaggggctggtcttggggtttaggagcaactcataaaatcctacctggtgggttccacgtgccatacgaaatgccggcaggaagaacctggtggctggtgatctcctgtcccagggaagatcttataaagccacatgaaggagtggtgacgattcaaaataatgtcactttcaacagatttttctgtttctaagatctgactttaggatgaagttttctagaatccaagcagtaagactggatgccagtttcttccatgcagcttcaaggccagaggcaatgtcaggaatttttcctctttctgcagcctgacagaccctgtgggggaatttggtgcttcccagtgattaggcgaccctgagaccctccaataaggcaggaagcaaacaaaagggccatttggttacaaactccccctgcgaccccataagctgttcaagcccgtgccatccttgaatttctttctgaaatgttccatcataaattgtcagagatggaagagtgggtgagaggaaaaatttgacgattccccattgctaactaaaatagcttattagctgccattttacccgtgtgctcggagacttccagaagggagctgttcatgtctcttctgcccctctccagaaaataattaaccaccccagtcgtcattgattccagaactatctgcccaggttattaataaaaatgttgaatcccggctcatgtgctgccctcccactggcatcaatccactgtgcacgtgcattaacgtgcggagaacgccaggaggaaatgagaggaggagaggccacatctccaagcaaggacgaagctcctcctgggattcaccacgacggttttagcctggtggtcggcaccctctgctgatgttttatttgtgtgttttccatgtagggtgtgtttctgtttttattaatagcaagcacactggctaattttctatcttaaaaatattgaatagagctctgaaaaggacacatgctgtagccagcactggggtgtccaccatctagaattagccgatgtcactactttaccacgtgagctgcaggtttgtaaaaggaataagaccggtgtagaaaaggtcatgttcccgtgatctcctgccttctccagaagcatcccggtggaaggcagcatctcttcgccatgtgtttgtggctttgctcttttgtgcatagacagaaattatgctagaattttatggctttttcttctcacttaatgcgtctgtgagcctctccccgtgggtccatgttactctagctcatttcagcaactctccagccagtgagtgtgccaggatccctctctctcctgaggacttggggttgtgtgtgacccttgctactttctggccatattcccacctcctccctccctcagggcacctggcaggattgctctgtttgctgcttgaagctggatatggctgtgtggcctggtttgagcaatgaaaggtgagtggaagtggtgcctgccaccacatgccgaaccatttaactgaccttgagcctgctctgggccctctttctcatgtgaaaatccaaaaatcaaagcagccgggaatgctgagcccatacccagagggcagctggtccagagaccacattccacctgctctaaaaatcaactcatactgggttaagctactgagatttgggggcaggttgttaattcagcaaaacccaccccatcctgactgatagaggctgcttccgattttctgttgttataaacagtgtgcagtgctgaccttcacatgtggccaggtttctaaagtggattcctggacttgctgagtcaaagggcacctgctttttcaactttcctggggttgcaatgtgttctcagtccctcccgcagcctctgagagagggtttctcacattatctctggcatgttcgtttagatcctgcacactttctgatctgaggagtgaggttatttcatcgctttaatctgcaatgggtacaactcttcacagatgcagtctcagttatgaggctttgaaatcctagggttttccatgataatgagagcaacaaactttttaatgaacaaatatcgtattttccactatattggggaatttttttaagttagcataagaaaacaaaagcccctaacagccaagtaaacttttggaaacacaagggaatatttataatcagaactcctagaaagggtctccttttcctcttaataaatagctctggccttattagaaatcggtattagggttctccaaagggacagaactaataggagagatgaatctatgaaggggagtttattaggagaattgaccctcaggatcacaaggtgaagtccctcaataggctgtgtgcacgctaaggagcctggaagccagtccaagtccccagatctcaaaagtagggaagccgacagtgcagccttcagtctgtggccaaaggcctgagcacccctggcaaaccactggtgtaaggccaggagtctaaaagcggaaggacttggagtctgatgttccagggcaggaagcatccgctcgggagaaagatggagaccagaagactcagccagtccagtccttccacgttcctctgcctgctttattctagccacgctggcagctgattagatggtgcccagccacattgacgctgggtctgcctcttccagtccactgactcaaatgttaaccttctttggcaacgccctcacagacacacccaggagcagtactttgcatccttcaatctcatcaagttgacactccatattagctgtcacaggccctctgcaatgtctatacttgttatctctagatgggagttggaacggagcaatggaaatgctgaagtgtttgacgtgactctgtaaactatggttgaagttcccgtgacttagaaaagtgacagtttcttttgttagtaaaagtttggttggcagtacttggttgagtgataaaaatgtcgctaaattcactaatgtcacttaactctgctaatctcacaaccttaataggattcatttgttacttatgacattgccaaaccaagcattatctttctatagtcagttatacaattaaaaaataataatagcaacaaagctgatggcgcctttatgatctgtccctgctgagacaagggctgaggtttcagtcagggggctggtgtgaccaggtgacccccaggaggctgcataaagactcgtgaatggcagctgtaaagtgctcttctcttaaagtaatctcacaagtgtaaattggcctcctgcaacgttcatttctctgagatggcgccttccttgctttcaggccactgaggcaaaggtggaccaaggctgttgacctgatggaatggagctggcaggtggccctcctcccaggaccctggactcccctaggattctagaaacagctcagattctgactggggatttttctgtcatctgcaaagataggctctccacagagctaagagggtgtggtggtacagctttctcttgtcacagctgaggtccctggaggctgccccacacccccggccccacacctggctcttggcactaaggtccttggaggctgccccacgccccctggccccacacctgcctcttggcactacactgtgtggtccggtcccacggccatgtggtctctttagatctgcggttctctttcagagatgatgctgccccgtctccccaggggacctcggcaatgccagagaccacagttgtgtatgtatatggcggggtacggctgacatcgagcgggtggaggctgggtacggctaaacaccccacagcccaggacagcctcgcagcagaagcatccagctccatgtatcactcgtgtccaggccgagaaacccgacgtagaaatccagcttgcccaggagagaggggtgggactcctggtgttcacttcgtagctgttctgtggtgggagcgcagtgggagccgcagggcatcggggtcttcgaaggaaagcccgtggattatgcatccaggaattaaagcagtccatgcaatggcagccgccaagcagagacggtgacgggatccctgcgttgacggtggcatgaccgtgtgtgatgggatgtgccgggggcagacagggcccaccagaccccacgctgctctactccgcaccggcccccctgcctgtacttgaccacactcctgccttctgccacagttgcagtttgggataattttggtggagaaagttgtaaaaccacctgaatgaattggcttggtccatggactggaagcctgactcccccgacagccctccctgcccccgaggaaggaaccttgttcctcggttataaaacttgagcttttaattgaggggaggggggatgcactagggggtcttggaacttggtacatacaggtgctaggtacaatcaaatgtatgtgataagtaattagatatccaggtagacaagtagggtgactagcaaatgacccttgagcagccctactggggccccgagtggacaaaccacaggcccctgtccttgggccctctcagatggcaggagcgccctcgcttctgtgggtctgacgcggagacagtgtctccagggtgctttctgagaccaaagtcgttcagcaaacagaagatcccagaaggcagcaagctctgccacgcagcatcgggacaacgtggctgtttactgctcccatgtgggagcaaccacagctttttaaaaagaccgagcagttttctgtgttaaaaattacctttaaaatgctaaagctgtggccatgtccaacatgcgtacatttgggaagtggcggtaaattccatgcaacgtcaattaacatttcacaattctgccggccgtgggctggaactttggccagcctgtcggagtgaaggatgcttttccttcaggtcatggcgatcagtctgtcacgggaaggacgctgaccccggcgctccccaggctgcacggtgtccctcattgctggcgtctggcgttcagtcactgtctgggcacccacatcttccccactctgtcccgtcctctttcttggaaaagctactgctgacgtggacttttttttcatgatcaccctacaaattcatttctctttttgtctttcactgtccagcactggagctgctggcagagccgtcaagagaaccggaggctttggcaactggtgccgctcatgcttggcgccagcgggcaggaggcagctttgtcctgcacaccgagacagtgtgcttgtgtatgtgagtgtgtgggggtggggtgtgtgtgcatgtgtttggggggtatgtgggatacggtgcgtgttcacatgtgtgtatgtgtgtgtgtggaggggtatgtgtgcatgtgtgtagagggtatgtgggatacggtatgtgttcgtatgtgtgtgtgtggaggggtgtgtgtgcatgtgtggagggggtatgtgggatacggtgtgtgttcgtgtgtgtgtgtgtgtgtgtggaggggtgtctgtgcatgtgtggagggggtatgtgggatacggtgtgtgttcgtgtgtgtgtggagggctgtctgtgcatgtgtggagggggtttgttcacacgtgtgtgtgtggaggggtgtgtgtgcatgtgtgtgggggtatgtgggatacggtatttgttcacattcgtgagggtgtgtgcctgtgtgtgggggtatgtgggatacggtattcacattcgtgcgtgtgtgtggagggtgtgtgcatgtgtgtgggggtatgtgggatacagtatgtgttcacatgtgtgtggtgtgtgcgctcgagtgtgcatgagtatgcatgtgtgcagaggtgtgtgtgtgaggtgtgtatatgcgtgtgtgtggtatgcatgtgggtgtaggggtgaggtatgtgtgcacacatgcatgtgcgtgtgtgtgtgtgcgttagatgcccacactttgtgttagtgacattctagggactcagtgcttctaggatccagtgactcgcaacattttgtaaaggcctcgcctcaagcacttccttaactcaactcctctgaagtccttaatgtttctcaggcagttttgtgcccagaaatcagggcagggaggggggtgtgtgtttccctctctgctacaatagacaagcagatatgaaatgagagaacagggcttgtgtgtggtttacatgctgcctggagatccagctctgaatgtgatgaagctggcctaggtctgaaaggttgaaacacagaagagaaattcaccaggaggacccagggcaactttcctttcaggataggaatctgattgggagtgtaggcaggaacgggttggctggctgggcgccgacgcggtgccacgggataatcctttagtgagccactgattggctggggggctgcacgggagacaggcaggtagttttggaggcaggcatctcttcttccgtctccgtgcccacgctccaggacaggtggtggctcagaaagcagacagcagtgatgggcggtgcctcttaggatgctgctgggtaaaggtgacttaggaaactgacagatcgctgcctccctcccttctatatcctttccacgttgatggtgtcctcacttaccatagtgggccatgtactccatcactgagtccatcaaactccccaagacccccaagtgcaagtagcttttactggattcagtctctcacatactcagccccagagctctttttttttttttttttttttttttgccccctgagacggagtctcactctgtctcccaggctggagtgcagtggctggatctcggctcactgcaagctccacctcccgggttcacaccattctcctgcctcagcctcccgagtagctgggactacaggcacctgccactgcgcccggctaattttttttgtatttttagtagagacggggtttcactacattagccaggatggtctcgatctcctgaccttgtgatccacccacctcagcctcccaaagtgctgggattacaggcatgagccaccgtgcccagcccagagtactttctgctctggcctgtgattctccgtagtgagtctcctgccactgttgaccctggggtgggggtgggggtggggggatactgccaaatacaagcctggcctcaatgctttcacactccttggccaatgatgacacaaggaacctttgaagtcagaatgttcccgagctcctgcccctgcagacagcgcaggagcagccttttcccacctgaggctgcctttctgggaatggccctgttgccacttaggtgttcacttgagcatctgaaatcgtttcccatgcatggacatgtgtgcatgcctgcacatacacgcacatatgtgtaaagcggcaccgcgtggggctggcagagcgactgtatccgtgttcgcacatctatgtcaaacagtctgctggcatagagtaagctttagataacagcgtgaaataaataaaaacaaagtaacacatgcccttggccttgaggggagggggaggcctttgcttcctgtgattcctcctggctctttgcggcagcatcaaaccctcagggcagggctcctagtctgtgtctgagcccagccctaccccagtgtcccatgctggagagtggggctggaggtccagtcaggcccagtccccagggcccctttaaagttagaaaacaatataagaggtttctgtgcatgggtacgtaaggggagaaatacccaaaaacctgtacagttccgagcagacgggtggtttcactctaagactccaagcaattcagaactgggccagaggggagctgagagggctccaggctgaggctcgggcaggcaggtggaaggagggaaaagggcccaacttgtccaccttctgacttggaagtaaggagccagggtcaccctgagaagagaaggtaaacagagtacaaagaggagaaggagagcagcagtgtgtttgtttcagatgttgagatcagttccccgcccccccattacagccctcgaatattttaaaatttaatatggaactatcaagcagaattcttggggcaagattttattcagatttgttgcattttagtggcttaaaatgtcattaaaaaattaaagcatgtttatacaaacttaaattatcagggtgtagcaactaaattgcctctaaaagcacccatttttaagtaattcaaagagaagagtgagaaattaggagtgtctgatggtgcagcacaaccttggaaggttttaaagaacagttaacaggtacaccgtgaccattattcttctaaaaagaaatgtcacaaatgaggagttggagacaggaaggataggaatattagaagaattggcaggtgattggaacattatcatcaaaaactagtgagaaaagatggctcgttcagggaattgaattaggaagattacagagctgatgccttcagagagtgcaagtcatgtatcttgttatataaaactacaaatgccttcgggtctcggggggagaggcgggtggaagccgcctttgggacggagggaatggggctccacgggggcaggcagatgttatctaagcagtgtcattctgtgtcttgccacatctccactttgcaaacgtgtctcatctcagaagatgaacagcaatgtcattccctgcttcttgatgttacagtgagaagtccttttcctgcagtcttgagaaacagtccttctgaccccaaggttgaaccaatagcaattggcgtgaaatacgcagtgacagtcgctggttaaagtggttggagttttatgggcataaacatgggtaaggaacggggtacctcactccctcccatgtcacccctctcatcatcccaaacacctgatgaggaacagcctggagcctacaaaggctcttcagacccacaccatcctgctggtgtctgttcaagatccacatacaaagcaacagtgctaaactgggagcgtctttttaaaaattactagaaggcttcaaagggaggtttagggggcaggatgctaagggagagctctggccatggtttgcttgctttgtgtacaaagttttcagtccagatgctcctcgtgtgttccgtggatgtgtgtccatgagggctcgcagcctctttatccctcatccatttcgggaaaggacgtcaagcacgtgctgggagactaaacagcgaagcctccgggatgttatgtgcaccgctgggggccaggcagtgtcagagatgccgagattgcagcattagacagaggtgctgccttcatggttctcagagtccagatacatgagcgcttagcgcatgggaaacattccccaaatcacaaagaggatgccaggactgaggaatagcccagggctggggcaacaggtttgctttgcagaatgggcgcttcctgtgcttgtggtcagctgccacccccctcagtgaaggtgccagctggtcctggagtcctggccactccttggagaagaccttcctccccactggcacccatcctccccgggactcactgcagccctggcctccttgtcctggcctccctggcctccctgccccaacctccctggcctccctagcctgcttccctggcctccctgccccagcttctctggcttccttaggttgcctcactggcctccctagcctacctccatggcctccctgccccaacctcactggcctccctagcctgcttccctggcctccctagcctgtttccctggcctccctgccccaacttctctggctttcctagcttgcctccctggcctccctagcctacctccctggcctccctgccccaacctcactggcctccctagcctgcttccctggcctccctagcctgcttccctggcctccctgccccaacttctctggctttcctagcttgcctccctggctgctctcagccactgcctcctttgcttcccctctcaggccattgggaagccttcctgactctccgcttggcaccacaggaaatctcttccctctgccagcttccagggctccctgtaactggtcccaccccatctacccacccctccagtatatctgcgggaccctgcccttgtgttcatccttctcacggggatgacctctgtcctcctccctgatagttcatatcctgcaggacccctagaccttcctcccacacccacccaaggcccttcttggatgccacaacctgcaccggagccctcctcttctttgggctccttgcagtgcagagagccacatggtggtgtctgtgctcttgtgttgccttctggattaggacctggcctcctggtggaagatggaacagcaatgctcccagagcctgcagtacccaggggcaggcagggctgagcaggagcggaatcactggacaggaggcagacacttggccagatgcgcacaggccagtgcgcagacagaatctcctcttgcagctgatggggagagtgggaagagtgaattctgcagttggtcagtcagacagttggttgaaatcccagctctgccacccactagtcttgtgatttaggacaaaccatttaatctttaaattcagtttcctcaaatacaaaatgcaggtaacgggcattcccttctcctcgggatcgataaaggtgtaatgaaagaatgtctatgaagcacttagatttgcacatggcatgtcatgggcactcaataatcagtagctaataaatatgtagttattattttgtgcgtttcagtccacagcatatataacagctggatgatgtgccggatgtgtaagcgatgccttgtcctcactgtcttgtctccgccttggtcacatcaacttggtcttgttcttttatctggtaaattttactggagtataaagtcatacagaaaatttcacaaatcactggtgtactgctcactggattttcataaaatgagttcaatgtgtaatcagcacgcagataaaggaacagaacctccccagcatccaaagcccctcatctctctcattcaattgccctcttcccatcccaggggcagccactctcctggcctctcacagctcagagaacctttgccattggggaacttcctatgcagggaaccacgtgacttcccccacctaaccttatgcttgtgagattcatccagctggtgggagtgtggtccattcattcccatctgcacaatagtgtcctgttgcagatgaaaacacactactgtgaagaatcttctagactctgattccaaaatttactagaaagctagtgtgatcaagacagcatggtactcacataaggatagacatatagaccaatagaagtgaattaagagtctagaagtgaacccatacttctatggccagttgattttttgacaaaggtgccaaaaccattcaatggggaaaagacagccttttcaacaaattgtgctgggacagctggacagctacatgcaaagaacgaaattggacccctacctcacaccatatacaaaagttaactcaaaatggatcaaacaccaaaatgtaagatctaaaactataaaactctaagaagaaaacataggtgtaagtctttgtgaccctggattaggcagtgatttcttagatatgactcctaaagtgcaggcaagcaaaaaataaataaacagtggacttcctcacaattaaaaatgtctgtgttttaaaggataccatcaaaaaagtgaaaaggccatagcatgacagaaaatatttgttaattgtatatataagagtctagtatcaagaatatataaagaactcttacaacttaataaaaaacacaaataactcaatttcaaatgagcaaaagttttgaatattttttccaaagaagacatacgaatgtccaataaacacataaaatctgtgtaacgtcattagtaagtaggaaaatgcaaatcaaaacaacagtgagaggccaagcacagtggctcaacacctgtaatcccagcactctgggagtccgaggtgggcggatcacctgaggtcaggagttcgagaccagcctggccaacatagtgaaaccccatctctactaaaaacacaaaaattatctgggcgtggtaggacatacctgtaatcccaactactcaggaggctgaggcaggagaatcacatgaacatgggaggtggaggttgcagtgagccaagatcatgccacggtactccagcctgtgtgacagagtgagactccatctcaaaaacaaaaaatgaaagaaaaaaacaaaaacaaaagagtgagattacacacccactaggatggctgtaattaaaaagacaataacaagtgttggcaaggatgtggagacattggaaccctcatgcattactggtgggaatgtaaaatggtgcagccactgtaaagaaaaaaaaaaaacttgtcacctcctcaaaaagttaaaaatagagttagcattagcatatgacccagaaatgtgactcctagggatctgcccaaaatagtgtgtccacacaataatttgtacatggatgtttatagcagtaccattcatagtagtcaaacagtggaaacaactcaaatgtccatcacctgaaaagtagataaccaaaggtggcatccagacagtggaatattcagccatataaaggaatgaagtccgtatgcaagctacaacatagataagcattggaaacattatgccaagtgaatgaagacagacacaaacccatgtactgtatgattccattcattctaaatccccagaataggcaaatctgcagaaacagaaagtattttattggtttccagagaataaggagaaggggaaaatggacagagacactaatgggtgcagggtttcttttgggggcaatgaaaatgtactgggttaaaagtgaagatggtcgtgcaaccttgtgactctactaacatacattgaattatccacctaaatgcgtggatttacagtatgcgaagtgtatcttaatttcacaaagattaaaaaccagcctttgaggtgtttccatttggggctattgcagataaagacgtgtgaacatccttgtgcatgtccttgatgagcatgtgtatgcatctgtcttgcaggtccgattgttgggtcatagggaatgcctgcaccctgctttatagatgtagtgtggtagatttccaaatggcagcacagatatcatcccaccatcattgcatgagcatctcagttgctccacagtctcaccagcacttgagagtatctatcttttccattttaattattctagagggaactgtaacttcttccaattctatctccctatcccctgtcccatgaggttcccaaagctgtgttgctgctggacctcgcttggtagatatgtgcatcaaatatggacagccgggaggcaagttccctccaaaatgagtcatgactccagaactgtgagcttcaaggtgagcctcagatgcaactaataatttacagcattgtggtaagctgtgcctgcaggggccaggtccctgtcctaggagctggtcagtgatttccatctgctctgaggagcacccacggttcagagcaggactccccagggcaggggcaggttctcccccaccccattggccaggacagcctggcctggctctaccttctgtttcagaaatcttctgtagagggtttcatttgaagacagagctatgatatatttgcacagcactaggtccatttctttctgttgttcttaggtgattttgttagggtcagagccctgatttccatttccttctggttcacattgcccttggactcccagctcccgtaggtgaatcggactctcagctgatgaagctaaattgcttctgtgatgtggttgaggcagggggcagtagaggaggcacaggctctggtgggcaaagacccagagccacagggctgcccttgaaacattatgtcgccactgaccaggacccaagagtccaagccctattttctcttaaagttaattgttcaaagtcacatgtacatcagagtgcagtgagtgctgggagagccataaggagcctttccccgtggggctcagcagtctggaaagggccccagccatggaactgggatttgttgcagaaacccagccaggctgacaacaggtcacccacagactctcaaagcggctgcctgggagccgcaaccagtgctgagcctgcagtgggtgggtcagccggcagagcaggagaaacactgtggatctgttgtgtgggtgttcctgtgtgtacacacatgtacatgtacatgcatgaacatatatgtgcatatgtgcatggtgtgaacatgttttcacacgtgcacatgtatgcacatgcgtgtgagagtatgttcgcatctgtgcatgtatgcgtgagttcgcatgtttgtgtgtctgagtaagctcacgttttacatgtatgtgtgcagacatgtacatgtgtgctcgtgtgtgcatgcattcttgtgcatgtatttaggtgtgcaagtgtgtttacatggcaaatatatgtgaaggtgccctcccagtattgcccatgtgtgtgcacacctgtgtgcatgtatgagcatatgtgagtgtatctgtatatgatgtctgcccatgggagtgctcttccagtatgagccgtatgtgtgtgtgtgtgtatgtgaacataggcgtgtatacagggcacatgcatggggttgcccttacaatacaagttgtagctgctgcttcatttgcttgtttctgagaaccaggcagcctccttgtgagtggtttctatgagtgtgtgcagaggtcattttaagagtgaagatgtatttatctttaattttggcgaggatgcggagtgaagcagtaagggcagtggggcctgctggcatcagccttgctttctcacctcacagctaagtgtggtgcaggtaactgggtgggacccaccagggtaacctttcgcaggatgtgcaggactgtcctgctacctggagcaggaccctctgaggacagggtctcatcctcccagtgcctccctcactctccagcccggtccatttgccatgacgatcatgccccacacctgggggagaagcagtccctttctgtctttctggttatgttcacctctgcagccatttgcacagagactaaaacggatttgatgtgatgaatcacaaaatcacaccctttattcgacaactccacataaatagcgattccatttggaatgaattggacccatgtggtgagttatgggctcattagagtagcagagcacattcctttatcatattaagtttatttaaatcacacataatgttcatttttagaaacaattcatacctacctttaaggagtcatcagtattgctccaggaaacatgatacaatcccgtttctggcaggattcacacggtttctagtcgtgtgacaatgtgattccattatgtcttccctatggggacagcccataaagattgattctacattaaaaatggtattaaagaaagacagcacattgtgtatgtaccgccctgtggctctgagcacgaagccgccctctctctgctccggtgcaccccatggtgggctcgccttggtgtaccccccatgtgggagacacagatgttctcctgcctttctcggtcagagcagccgtgaccacagaagtttgccagggatgccttgaacttcagcaacaagaatgtgcatttgtgcattggtgttttcaaagcttggatctgttctagaaaatctatccacccagggccaggatgatctgggcaaatgcaggctttgtcctcttgtgaattcccactgtatgtgtcaccagaattcagaacatagtggagaatctctcaggccttttatgattcagaagaaagaaatcatggagagagaggctccggggggcaggggtggagacggggatgacacagtcctccaggcagaggaactgtgttataatcaccactggtatatctgggtgttctgcacacagacttttgttaaacagcagaaggatcttttaagagaaacaatgaaagtccaaacagaagcttgagtgttttcttaactgtgccacaattgagaacaaatggaacaagggggcctcttggccatcacacggcgaagactctgtggtccaaaattcccgttttcatagcgtcccacctgacgacatgcagtctgcaacttatgcatcaaaatcatgctttctagaggccacccgtgtaagcccgcgtgcttctccagtgcccccagtggaggtcccccagtcttggtgccccccaccttggtgctctgccttgaggcaggtggccagtggctgtcctctgcacagctgctgtcagacaaggagggtgaaagggagctgtggtcggcccgtcctccgaccacaactccggggcaacaacaccgagaacacgtgaggcgccgccatcctcacaccagggctgatccccgcctcagtttggggcctgatgaatagaaatgtcactggagatggattttcaatttaatcgaaagaaaagcttctctctggggctttccaaatgtgaggtcatcccttgatgagttggagagaatgcttttcagttttagccttcctcttgggtgtgtgggtgttgggttcatgggtgagtgggcatcctgcaagccataagctaatactaaaaaggtcgggattgatgctggagtggacacgttctgtgatcgaagacaggatctttctctaaagggccaaggagtacgtattttaggcatcatcaccatgcagcctgtgtcccaatgacaacacactgccattgtagcacaaaagcagctgttggcaacacccaagcaatggaagaggctgccctcctgcaggaatattcgcacaacccagcggcaggtcccctgcagctgagagccagagtttgccgaccgttggctgatccaagggactcttaggtctgtgtgactttcactaagaccacacaagatcatgcaaaagccaattccattccatggttgccgtcgagtgggaagtaaattttatgccctccaggaccttggtctgctcactgcagacttctggtatagattaattgagtttcttcttgtgatagctgttatttggatagcttagaggaatgagaagagataaaactcatgagtgaaaatgccgctcttttacattcttgctccaaatcgcatctttgtgttagtggaatggccacacttttgggatatgcttcgatttcggcgggagagggaaccacggagcgcctcttgagaaggctcgttaagggcgtgaacgtgcagccacctgcattttaatcactcaaagacaaactcgggccattctgtgctggtggagcatcactaattctagttatacgataatgacgcggcgctggattttaggaattaggcctctgagatccattagctgtgtggtgcaccgtcgctgaatgaatggctgtattattatcaaggtaattcaaaacaaatttcaagctgtgacaataaaatggttcttgtagtaggttggggtttgtgctgaaattgccagttggaatgagaacagttatgttttcaagctcgagttttggtggactcattttaggctgactcactttcattaaattctgaacaaattttttattaatgtgatcatatcagacttggacaaactgtgattattgggtaataatgaaggggtatgtctttcaccccatttagctgctgggtggtttttggtctaagattacactgttcttatctatgttcaagatagagaatactcaagaattcacaccaagaaccctgtccctgggcagagttggtcccaaatctaggaccatcctttcaaaatcctcatgttagtggcacctgccccccaagtcccatttccatcccccttactcatgcttgatgccatcagtacccatggagaaattcttttcagcggcaaaagtgtaggtaactttgtaaatcctttatcttatttctaatgcaaaggggatagaagaggattttgtagctctctggggctacctggccatccctagagcccacactggcctgcggcctctggacctgcccccatctcaccagtactgcctcacgcagtgcaggagatgctcaggaaatgcgtatcaggcaaaagaatgaaggtcgtggtagtgatcatgttttgagaaacgctgcaggctccatcacaagagcacaagaaaatggtcccaggagagctgcgaatagcatcccgtgcgtcccgtctttgcccactaccctcaacacatgtcaatactcattgtagtaacaagaagtcattgcctgcatttaccaaaatgtccctgcaacacacacagcagcctcctgagaaggtctcacctccggagtggccagcatgccgtggtccccgtggcgagcaccgtggggccgctggatggctttgctgcctgccagctggccccagccttgcgatccctcactgatgaatcaccagctgtgctaagtggctttaaagactaaattattttcttcctgttaggcagacctgaaagaaacctgacagggaaacaaaagcactgctgggccgggcgcagtggctcacacctgtaatcccaacactttgggaggctgaggtgggcggagcatgaggtcaggagtttgagaccagccaggccaacgtggtgaaatcccatctctactaaaaatacaaaaaattagctgggtgtggtggcttatgcttctaatctcagctactcaggaggctgaggcaggagaattgcctgagcctgggaaacggaggttgcagtaagccaagattgtgccactgcactccagcctgggtgacagagtgagactccatctcaaaaagaagaaaaaaatttttaaaaagtattgctgctcgttggaatgctgatggccatcactggggctggaccgaaggggaggacctccgggagccacctgcaagagacggcgcgctgtcgggaggaaggcggtttcactggtctgatccagcagttaaagatcacccagttagagtctcctttctttttaatttttttttctttttttttttttttttttgacacagagtctcactctgtgtgtggcccaggctggagtgcaatggtgtgatctcggctcactgcagcctcccaggttcaagagattctcctgcctcagcctcccgagtagctgggactacaggcgtgtgctgcttcacctgattaatttttgtatttttagtagagacagggtctcaccatgttgaccaagctgatcttaaactcctgacctcaagtgacccacccacctccgcctcccaaagtgctgggattataggtgtgagccactgcacccagccggattctcctttctccctgcatgtcccagctggccatgccgctggcttcccggggcttcttgcttgccagtgcggtgtgcaccagctgacctggccttcctcggaagagtggaggccctcggctgcatgcactgccaacctcagagcaccacgtctcaaccatggaccctctgtccatcgacatccaacttattctgccatcaggcattaggtagcccaagttcccagcaacgagtgcatagaggagatcgaccctgccactcgaacttcggagtcgcttgtttgctctgcttatctggtcggcggagacaaaggaagaccccctgtggcagaccctgggaaccaatgtcatcagcatcccagacagtgaatccccccacctgcgggtgctccccacttttatcaaggcccgggtagcagatttaaagagcacgtgactttttaaattgctattttagtttcagggggtacatgtgcaggtttgtttattgcctgatgtctacatgtaaaacctcaaactatgaagatcctagagccaaacctagcaaatattcttctgggcatgtgactcgcaaccattgtttgaggagttttgcattgatttaagcttatttgaaactttatgggtgtgtgtcacagttgtgggggaagttatcctgaagatgcttccagatgccaaagccacgtttttaggagccacagctcagacggccctgggccaagtccttggccaaggttccctagcgggttacttaccccgccctgcactccagcgccttcatgtggaagacaaaggtcacagcagccccacccgcggggccctggcgagggctgagtgcctgagtccacagaggccttggaatgctgcccagcagggcttagcttccaggaacgtgagccatccccaggtcctggtgaccacctcgccatgaaggcagtgccccagaaggagcccgggtctcagcctgggggccctcagtctgtccatccggggatagtcctggccttcgcagcgggagctctggacctccatactggatcccccagccagcggacatggaaccagccaacctcttactctccccaacccggatgagagggacgggccggggtcaccgctgtgaccagccgtttatacccagatgagcagatgaccaggcaggggatgcagttttgtgatcttggtgatcaggccattgattatgccccgggcccaggtccccacccacaggcaaagcctctgaggtgcccgagcactccaggaatcatcctgtcaccatgctttccacatagctgtccccaccccaccacccccaagacctgggtgcacagactcaggaattcagaattatctcttttcgccattgtggtaaatatggggaatccagtatcacctctgttcatgtcctctgcatctggtgaccacacaacccactcctgtaggatgggaactgagccagagggcctgccagatgtgccacagggcttggccctgtgttttcaccacagccttaaggggaagcacaggcgtcatccccgttttgcagatgaaatgtgaaatgctagagcacgagcagtgggtgattgctcccagccacatggcgggtgcaggccaagccagggctggaggccctgggccgtccctcttcccgtctcctccaagtggcctgcgtgtgtccaatgtacttagaaaaggaatgatgctttaggagaatctggtagaaaacacaatggcaggtgggtttctgcctttgtcccagtgggttccagtaaaggtagactgtggcccgtgagcccaatctggcctgctgcctgtttttacaaataaagttttattggaactcagccatgcctgtttgttggcatcctatcctgcttttgtgctatgaaggcagagttgcaaggggctaatttagccacaaaatgagcatgtttactatctcgccctttacagaaaacatttctgacccctgctttaggaacatggacaagaagagaaaaacaacccacaaaggtttatagctcctttcctgtgctgaagagctggcccttctctgggccccagtggctgcatgcgccatgtttctgggcagtgaccatatgatggcagtaatgctgtgtctggaaatcctgaccccagggctcccagagagagagagggaccttcgtgtggagaggtggaccccagggctcccggagagagagaggggccttcgtgtggagaggtggaccccagggctcccggagagagagaggggcctccgtgtggagaggtggaccccagggctcccggagagagggacctccgtgtggagaggtggaccccagggctcccggagagagagagggacctccctgtggagaggtggaccccagggctcccagagagagagagggaccttcgtgtggagaggtggaccccagggctcccggagagagagggacctccgtgtggagaggtggaccccagggctcccggagagagagagggacctctgtgtggagaggtggaccccagggctcccggagagagagagggacctccgtgtggagaggtggaccccagggctcccggagagagagggggaccttcgtgtggagaggtggaccccaggactcccggagagagagaggggcctccgtgtgcagaggtggtttgtcgcttctttcatcttcaggacagtcattgcctgggaaactggggggattggtccgaacccaccttgtacaccccagacttggtgcgtccctgcaggatctgagcacagaacggcctgcttcagcccggctgccaggcctgcagagcagggagagtccccatggaatgccactgttcagaccacctgtggttgaacagagcaatacaggagtctgttccagctgctcccaccttgccatgggaatggttctctgatttattattttaattaagggcttttaagctttaatttaaaaagttaaatcggctctctttatatgtaaatcgtggttcagtgagttatcacacattgccagatgcacactgtcatcggatggaagagcactgtcctgtccgggaccccagtccctgagtcttcacggctcctgaagcagcaacaggaccccctgggatctcagcccagggatgctgactgaagccctcccaggagcacggctgggtccaggggcaccagtggccctgcactgtgctcacagtcttgtccagcggctcccggagcaacctctcctgacctgtgaagtctacacgagggtccgtggggagcccaggctcagcactgcccagcggcagctctgctcttagctccagagtccggaacaacctctcttgacctgtgaattctacacaagggcccacggggagcccaggcttggcactgcccagcggcagctctgctcttagctctggagtccccttgccggctccaggaaagcaatgtgaaagtagccgttttcacaaagcaggcactcaccatgttagcaatcagcttccgtttctgctccttgaaacgccttgggaagaaggacccttgtaggtgcagagtgccaagggtgtggagagctggccggcccaggaatccagccccaatgtctccctccttctccctcacttgctccaggtgcttggtgtcagcctttagaaaacattggtcctaattgttctctttcttttgggccgacacattcacactcagcaggggtgtgcagggtggtagctgctgctccaggggctgccccctcaccagcattccatgaaatagttccttccactacccgtggagtccagcaactggggccaggtcactctgccaggcagcagattctccatgggtcctcgctaggccaccctgctccacatgcctgcaaatgcagctcccttccagctgaagtgcctggcacccctcattgggaacacagggacagctcacctttgctgagccccctctgtgtggctctgtggagctgtgtcctttcgccccgtaatgggcatagggtgcgttatattctgactgcttggtagatatgaagctgaaacccaggcaggttctgcacctgttgtattaacaggtgatgcgtgcagtagtggggcctggattacaacctgccttcttggcggcaaaactctgctttcttccattggcctctcaacctacccagaaatgagactaattctgccctctccttccctcattcacttctctgtccgtccctcaatgcacctcctctctgtcgtcactgccctcagtctcctgtgaggacagcgtttgtgtttctctcagtctccctctcctttctcttataaggacatcagtggttgggtttagggcctaccctaaatccaggacaacctcatcctaagactctgagttacatctgcaaagacctttattcacaatgagttcatatctgaggttcctggtggacgtgaatttgggagggggcactgttcaccccactctggccattaagcacagtgtgtgtggctttgtgtgtgatctgggtgggatgtttgtcgcttcctaatctcatgctgagatgtgatccccagtgttggaggcaggcctggtggaggggattggatcttgggggtagatccctcatgaatggtttagcgccttcccctcggtgctgagtgagttctcgctctgagctcacgggagagctggtcgtttaaaagactgtggcacctccccctccctcgtgctctcactctcaccatgtgatgccctggctccgcttcaccctccaccatgattgaagcttcctgaggccccaccaggagcagatgccagcaccatgcatcctgtacagcctgcagaaccacaagccaaaataaaacctctttctttataaattacccagcctcaggtatttatttatagtaatgcaagaacggagtaacacatgtagataaccccaccctgcaattccagtggacacgagctgggatcgggaaggaatagaaggtgggtctgagagtggacatagccctccctcagggattcaaacaagcagcccttcccatagcaggcgaggtccccgggggagatgcgggagcatagggagttgtaaatccacagcattcactccacttggttttcgtactgagcctctgaaatgtgaacatgttaccatttgttttcatgaggattaaaaaatatcacaggaaagcagccacctggtagacagcgggtacccaacacactgctgctggatttgtttctttgctgccactggtggtgctcttggtggtggtggtggtggtggtggtgctcttggtggtgctcttggtggtgctggtgctcttggtggtgctggtcctcttggtgttggtagtggtcctcttggtgatggggtggtggtggtggtggtcctcttggtggtggtcgcggtgctctcggtggtaggtggtggtggtggtggtggcggtgctcttggtgatggtggtggtggtcctcttggtgatggggtgatggtggtggcggtgctcttggtggtggcggtgctcttggtgatggtggtagtggtcctcttggtgatggggtgatggtggtggtggtcctcttggtgatggggtgatggtggtggcggtgctcttgctattgttgttgctgttctctgtgaggcctgatcagaccatgtaacaaccctagaaaggctatgaggaagagctcagccacctccttggggctgtttcaggcatttcttccctggcatctaggtgtcccacttgcacacctgaggcccatgaggtcccatgccatgcagaggttaagctccatgggtggtagataaattacccaaacaggtgatccaatgtctgcatgcagttgcagctggggccacagacccctacccaaaatgattgctcacccctgagaacagagtaaggcagtgccaagatacacaatgcagggaaaggctccagcagaccctggcagaggagaagcctccttccacgtagggaacagcatctgcctgcagagggctgctgccaggagccagccgaggctacatgcctgcctggacgctgtcatgaggttgctgccggggttgctcagctgcctggggtgagggtgtctgcatccaccccctctgtcctcatggggttctccagccccatgtacactgttgcctcccacctgatgggaggaccctcgtcttgtccccgttgcccatcaagtgcctgccaccgacagtggccccagccctttctcgggtgcacagtgccacagccggtgggtcgctggtcctctgcttccctggtgcctcgggctgagtctcctgctggggcatcactgggctgctctcgtccccgacagactcacccacttcttccacccctgcatggtcccagggcttcctgcccttgccgggcccatgtggctgactcctccgctgtcctgctgtttcccaccatgtctgaccatgagccgcctttttaaggaaagcagattggaccaagtgtttctcgcctttccgttgcttttggttcttccaaaggttttgaaagtggttggaaaacattcttattttctcagggaccattttcagcttctctaccaaggatgaagagttggagtaaaaatgaattacaaactggcagagtcagtatccacctatttaccacgagccggagactttcagtggttgccagcgtagaacgctcatttttattaaccctatttccttcaagtgtctccttccatggagattgacaggccccgcacatggacatggggagagaggaggtctctgtgtctgcagcgctctgacatcctgcaggacgggacaaggtggccccgaggacccgtcagtgcccacggggtgcccataaaactttagcagtggtacatatttacccaaacttcactaaatcactttctaatttaccagtcattgcttgagaggccggaaagattggaagcccaaagaactgagcagggccgattctaccgggagaaagggtcaccgagacactcaacagctcgcttatcggtcactctccgggctgcgcctcctcggggagttctgggtttgcgcgggaggctgccgatggcacgcggctcacagataatgcgggaatggactgcgtgtcttcctcccagtgtcttcagcacacggctgttgccagcggcggtgatgggcttgcctgcctcgggggagctgatgggaggagggggagctttgtggacactgaggagctctgtgaggtggagagcagctctgttccaaacgcccatatccgttagcatgggactcaacctgtcaccctacatcccaccaagctgccatccaaaaatcactgtttagtgtatctgttaaaagtagcatgtttcaaattgcacagaaaattccgaaagctgacagcacgcagctgggcacctgtctccgagccccccaggaaaggcctttgtaagctcttctagctggggacggcagaagttaccttagtctatttaggctgctacaactgcagacagactgggtggcttagaaataacagaaatgtacttttcacagttctggaggccagagtccaaggtcagagaaccagcagattcagtgtggggtgaggtcccgcttcctcattcatagctggtgcctgctcattgtgtcctggcatggcaaggggagagggatctctctggggcctcttttataatgtaattaaccccattcaggagggctccaccctgggccccttccaaaagccccacctcctgacatcatcaccttggggcttaggtttcaacacacaaaattcgaaatttgggggcacaaacatttagccatagcatcaacagactgttgcagaccatgccgggtcctcccctggaaggagcagggcagaggggaaatgagctggaggcatgtagaaataggccaggtgtggtggctcatgccagaatcccaacactctgggagactaaaacgggaggattgttcgaggctagaagttcgagaccagcctgggcaacacggcaaaaccccgtatgttaaaaagttagccaggtgtggtgacacacacctgtggtctcagctgcttgggagcctgaggaaggaggatcccttgagcccaggagttcaaggctacagtgagctatgattgcaccactgtactccagcctggatgacagagtgaaaccctatctctaataaaaagaaaagaaaatatatttaaaaattttaggtagtcatagaggagatcaaaataacagaattaatgcttattgttaattacttttttatggaaacctaaggaaagaaaagcaaaggtctagaggcagccgtggcagggtcccctttaaaacagatgaacccttctcatgagaatatagtgttgcagatacggtgacagggttcagctgtgtccccacccaaatctcaccttgaattttagttcccataatccccacatgtggtgggagggagccggtgagaggtaactgaattatgggggtgatttccccatgctcttctcatgatagtaagttctcaccagatctgatggttttataaggggctttttcccttcgttccacactcattctccttgctgccgccatgtgaagaaggatgtgtttgctttcccttctgccatgattgtaagtttcctgaggcctccccagccatgctgaactgtgagtcaaacctctttcctttataaattacccagtctcaggtaggtattagcagcgtgggaactgactagcgcatatagccagacacgtggatctttttgatgatgtctggaggatactacaacaaatttatgcattcttcctggtcttcccgccttcctgctatgctccagtcttggcgccttggcacttgctgttccttctgcccagaacatgcttccccacccagctccatcctgtgcctcctttgggttttggctcagacaccgccttttaatggggctctcctgacttccagccttaggcttgagctgtgctcttccctccaagatactgggtctcctggcagccatgttccttcctgggaggctgcagctcacgcacctgcattgcatgagtggattttcttcactgctttctcccccaatgagagtggaagaggtgacttttctgctcagtcaaaggtgcatcttcagtgcctggcacacagtaggtcctcgctcaagactcaacagatgaaagcccaaacctgaaatctgaaatcagtgacccagttgagggaccactggactgcatgggtcatgggggcagcaagccagtttgtgctctctggagcctcagagaccctggggttcaaatcctggccgcgccacttgtcctgctgtgggtgagcaactggccttccccgaaccttggttttctcatctgaaaaatgggcctcatattgctcgccttctggggtggccatgatgattaactgagatgagaggcgtggagtttccagaacactgcactgcacatagtaagtgctcaattaatgctagctctgattttcatctcttgtaattctcattttaactcttatttggagataattgtaaacttagaggagttgcaagaataagacaaagaagtctctgattttcttcactgactcatcacctgttatttcccatgggttctatacacaatgtctgctctagtctctctgtctcccctttctctctctcacatctatctcagaatacacacaatattttccctgaatcatttgagaattagttatggatatcacacctgttgcccctagatacttcagcatgtatttcctaagaatgggatatactttaactacaatgcaattactaaattcaggaaatgtaccaatgatacgagattcatatctaatctagatattccagttttgccaactgccccccaaatttttttttgaggcggcgacctcccgctaatcaagatgccatcccagagcagtcattgcatttgctgtcacgccctttcatctctttagtctgaaagattcctgggcctttctttgtcttgcctaacactgctgttcctgcagagcccaggctagttgttttctagaatgcctgcagtttaggcgcggctgatgtttcttgatgacacttttattattttcatcagtgttatcattacagaattgagggcctcattcgaaaagtacaaggccggttttctgggtaaaacactcctctctttagctggccgctcactgtctcggcaccgattttacatggcccattgcttgctggagtgacatgaatggttactatggcgccgttacgcatggggagttccagggaaaatgagcttcttgcctaaaacaagtgcaggaaaatattgagaactatcttgggcctgtcacttggggagcactgtagaaggttctggagaaggcattgagactataattctactttaatgagctgggctacctagattctatggtacagcaagagaagctgtttgtatgcacctgtatgtacgtgccttacttaaaattcagaaagaaaatcttcaggtgccagaattacttgtgaggctggtgaagagtgaaaagccacttcccaggccagacaggaaagagtgccctggttgggaccagacgggcctggctgcagacgtacactttgggcttcagcagccctggtgctgccttgagcttgacccgaattgcttcttcccagaggctgggtctccctcgcagcccctgctctcaaggatgggaatgagaaggtcgatgacaaggcacctctgctttacatccaagcgttgacttttgtggcttcctttaccccattgctctgccctttaaagggtcctggtgtgtttgggaatgggacagacaattttgtttttcacaatggtattgggctgtggatccagaactcaagttccagaggaaagcgatgccaaagtcaacagggatgcttcacggaggcagggaaaatgcaggaggtaagatccttgagccacggcttgtgatgatgccactgtaataaatgctaattaccttctctgccgcgccagggggttgctgctgttttcttccccttccaagtgtgttgcgtttggatgtgtagtggctgttaagaagtttgtcagcttctcctaagaaaacgtcagtatggaggcgcttaagtaggtctgtgtgggtgcagggctgcagggaggcagtacattttgtagctggaagattcgccgcctgtgtgtggggatgcagagagtgtggtggatacctagctgttacctggctcatctccaagggggcaaggcctgtgcaaggtggtggggtccaacaggggtttctcccccacatcctcggcgtggctgtgtgaataacccgcctgcagggtcctttcctgtgtccagcctcttcctccagggacaccggctttgaggatgcattggtcttttgttctctgtggtgtttcccttaggagtggtctgaaacagaatttggaccctggtccttccacagccttttgatgtctgggaggaccctggcatcctcaggcacactcaggtgcgtggctgatgttggtgcagaaggactcgccatgagccgaaggtagacagtgctggccttgacatcgggtgagcatctccttgatgcccagagggtacctgggctgtaggtttccaggcgccatggcagggagtgactgcaggacccagctccgtgggccacgtgatcagagcacggcaggtgccccactttacaggcaaaccctgtccccaaaacccacctgtgagggaccagtacaggaactggcatgggtctttctgcagcaacagggtcctcaccgcccctgcattctatgccagctcccagaagcctggcaagccccagctcccactgaaggaccttctataggagctgaaaatgaaataagactacatggctgtggtggacaggaaggacctgcctctcctcctccctctcccctccccttctcactctttccctccccttcccacccttccccaccccttcccgcccctcccctccctgcccccagatcctcaggaactctcagaatcatgctgcgccaggcaccacaccatgcaatatcaccgaatcacatgtggtgtccctacctcggctctgtgcagtacatgctcatgttttgttcccatgtttcagaggaggaaactgaggcacagagacttcagttccccagggtctcacagacaaaaggtcaggagctgggattcaaacccagggacctctgccttagagcccaggcccttcccgcgtgagtgagacagaagcagccagcctgagccagccagagtttttatcctgagggctgctgcctccagaatgcaggcttcacttacgaaggaactggcagccgtggggatctggggggcctctcttgggcttggggccagtcatatcagctccgtgttaagtccaatttcactttaaaatggattttcctgtttccttgaagtgtgtgtgtcccttagactaatcatagatagataatacatgatgttatatgtgttatatctaaatatacaaatattatttaattcatgggaatgaaggctgaagtttcccaagtgacagagcaaaagctggagtgggagacgcaagggaagggacagaggatgtttgcctggattcaaagaagggctggcctggggtgcagtcagcacgtcttgaaggactgagggaaacggccggctggggtgagcctctgccctctctcctggaggagggggaactgcaggtcctcccaactcctgccctgccattcttaggaagcatcccctctcaggacccacataggcaatgggcagatccacgctgcatggtgaggacacccagtcctgaacaaggcccccaggacagcgcgtctttgtatgaaaggctccatatttccaccatctggatcagtttgcgtcacacaaaagaggagtccttctcagcttagcattgaaggctgacctcagagaagacagctcctagaggaatatgcagccccaaggggtcagtcttatacagatgattcctctttcagaacactatggatggatggatggatggatggatggatggatggatggatggacagacagagggagagatggatggacagacggatggatgatggtcagatgaatggatggatgggtagacagatggacatatgggtgtacagacatgggtggaaggatggatggacggatagacggacggacggatggatggattgatggatggatggatggttggatggatggatggatggatggatggatggatggatggatagatggttggatggatggttggacggatggatggggtggcatgtgggtttccctttgcaggtcctacccctgcacagtcctttcttcagagagagtgagctgatggggtgggagcgtcctatttcagctgagtgttaaagcccagagaatagaaccccacccagcagggaactgaagcaaagggaacaccagcctcttcacgtctgggaaggagagtcaaagtccaacgactgcacagtccctggcctggtggatgcccatggctcttattggcatttgccttgagatttgctcatttcagaaacacaagttgagtattttgaggtttttgtagaaatgtcacctgctttggcatctccagaagcagaaggactgttgctataattagaccacctgccagggtggcatccggaagtggggcatggagagcgcaccatcatgtctgagggtccttgggtccctgttggcatgtttggtggagggggtcgtgtcccacagtcctgaccagcgtgggcaccccagggccatcccaggagcctcggggcctcctggcttgcagcacagtggccctgatgttccgctgagcagcatgagcctgaagccagagctgaccccccatccacacggggttcctgccattcctagcaagaggaaggggcaacagccgatgtgctctgggccctcccatggcagaaatcccatcacatggcagctacggctgtgtatataaactgcatataaacacaattttgataaactcaaacacaggacagatggaagggaaagctgtgtgctgataacatcttgagccctgccaggagctcccctcgctcacctccctgcagccccttcctccctccctcaggagaaacagtaggctctggcttgtagctgctgcagctcctgaatccagctgatgatctgagtgcctgtgagggccccagaagccccacgggcctgcgagtggaccttctggccagcgaggacccacagccctggggtggcttcaagaacccattcaccagctggccccagctggcctcgtggcctgggcccctcgcctggagcttgctgggcgtggtgaccacaaaggtgccttccctccccatctccacaccttgcacacatatagattcaaaagagcaagcagcaccatgctgtagcccagccaaggctaatattcttactggggcctgctctcactggcccagccagcaaatgcctgtgtgcctcaccatgcaaggatgtgcttggtagaggccccgtgggccccgtgtgcaacgtgaaatgaagtggacgtaggcatctcactgcagtgggagtcatggagcacctcgaggggagagaaggcacagcctttaaattgctgccagagacagagtttacacagttcacacgtacagattcaacctgacccccacccccctttctccttcctgccttctccccatttgtgaatgccattgcaagcttgtggatcttatttaattacagagaaaaaaaatggtctcagtgtaagtataaaaatattgcagaggacccaatgtgagaaatactgcgtccggccactgagaaggtgccacctccccacaaagcccttgttccaggacaggctgcctggatggaagtgctccggcctctccacaggttgggggagtcacatctctgctttaggggctggatcctcagctcttctctgtgggctctggaccccttataaagctttggaccaagtccagggttctcatagaagtgccagctgccatatgcctgagccatagtgagttaaatgcccacaagcagtgttccagtgagtggaactccacctttgctgggaaggattctctcaggacagagcaaagataagctaaagcagtttgcacacctgatgataaactcatgaagagtgctgccgtgtgaagaaacaccacgctgggaaggtgcggcacagggtctgagctcggggttttgttaatgaggttctagcaggtagagctctttcatctgcaggtgacaacactgaattcaaagcggccaacacaaaaaagctaagtgccagagaaatccagggtcagcttcaggagcagcttgatccagaggctgaagccattaccagggcctagtttctctctatttccactacctctaggttgactcttcagtcatgatggcagcaagctggcaacgacaggtctaagcctgtgtgttcccaagtttaagttgaggagaaaggagagaggtttttcctggtattgttaacactaatcccagggtatatacttacgggttacacacagctccagttttatggcagacaccataaaacaaaggttcttcctgtcagattcagtgacacatttcacaaatatttgttgggtagtctataatggtggtagaaagacacagacctgtactcgtggagtttaaatctcttcgtgacagttattaataaaatcttggaatgaagaaaaggcaatggagagaagggatcatgattctatagaacagggcttagcaacctggcacacacgccatatctggccctctgcctgtatttgtaaataaagttttattggaacacagccacacccattcatttacatattgtctgtaactgctttcattctgtgacagcagagttgagtaattgtagtagtgaccttacccaacctgagagatttattatctggcccgttacagaacatgtttgccaactcctgctgagcagcatatgataaaagaaattgacccagatgggaggtaggcacagcttccctggggacatgtgagccacccaagtctcaggaataaataggattcaactctgccagtaggggagaggctgatgacatgggatggggctggaaagacaggaaaggtggctacctcaagggcttcgtccttgggttttggtctaagacatggtctaaggattgactctgagtaggaggaaaagggagggaaggagaagggacaagtggaggggaagatgaaagagggggtccagagggtgtgctccccattcggaggcacgcagtgtgggctccgaatcaaagctgccagaaagaactggagcacagctcctggtagcgtggcttctcagtgtgggctttattttgacttttattttttgtgtgtgaacataaaacagttcttcctgcagcaagacagcgacgtgtcagattcatccttgctgggtcacccaccagcagagccattaaccctctctgtcatgatgcttccccagctgatcgtgtttgcagctggcaggtcagggttaggagagaataaaggttccttgtgctgagaaacccacccaggctaatacagattaactgaccaccctaacccctggtcttggcttcactagttcctacttgacaaaccaagctgattacccatctcaccaggatctaggacagcacctggcttggagtaggagtaggctggcaaaaatatgtctgtaccactgcatcccctccctgaccggaggcagacatcactaatcgatcccactctcttctatccctcacgtgaggcagacatcacttatcaaccctgctgttctctcctctgggccagatggagccttgtgagttatctcagctctgagctcttaatggccactgctgccactcagcacccaggagaagcgtgttcacccctctaatgctgggtgctcagaaatgtcaggcgaatgaagtaagagggcctgtatgagtgcgtggatttctctgtggcaaaatgtgtacctctccacagtttgtttggaagactgaaaacaccaatccacagttagccccattaatccttgggactctagggtcttgggagatttcattatttttaatgccagagaagaatgtcattgcaagagccataaagtgcagtaggaaattaaaaagcaacaagggaaccccagctgatggctgtaggagtgcatggaaacattcacttgtgtcaccacataaatgttttgtgtgttaaaggatgcatggatgttttgcatgttgaaggataagtagatgttttgtgtgttgaaagacaagtggatgttgtgtgtgttgaaggatgagtggatgttttgtgtgttgaaggatgagtgtatgtgtgtgtactgaaggttgagtatatgtttgtgtgttgaaggatgagtggatatgtattgaaggttgagtgtatgtgtattgaaggatgtgtggatatttgtgtattgaaggatgagtggatgttttgtgtgttgaaggatgagtggatgttttgtgtgttgaaggatgagtggatgttttgtgtgttgaaggatgagtggatgtttgtatattgaaggatgagtggatattttgtgtgttgaaggatgagtggatgtttcgcatgttgaaagatgattgtatcttttgtgtatcgaacgatgcatagatcttttgcatgttgaaggatgcatggatgtttttcatgttgaagggtctgcatggggaaaagactcaatcatggtccatgagagctgagctgaatctctgattttcttgggcacaaccatgggcctgggttctctggggtcccaggaaggatgggtgggttggtgggtgggctgtgtggggctacacatttgaaatgcagcctatggttctattgtgttccagatgcttgcattggagggagaaggtgcttctccttggttgattaaatctctgggtggcggccctgggcagccccaggaaaacatgctgatgctcaataccaagactatgtcttgacataatgaacatttctgatccctggctccctgcctgtggatcatctaagaagcaaactagcctgaggcaaagctgtgcatagggaaagcttgtcttcatttctctccttaatgtctccttccctccttcaagccccactccttccctgaggccccctgtccccacacagcctccccaccatgcaggactgccaagcttgcctgcccagccaggaaacctctgcccctccttggcaaatctctctgtgtcccgaccctcagctctactcaagttaaggtgtcattccccatatgtcctctctgccagctgtcacctgggaagggccagagcaattcccaggggacctgttacctgtatgatccacccctgttggtgaagagagaggtccttttacccaccaaagagaatggctactgagaatgtgttgggcaccagggagaggccagggcactgggggggaatgacacactgccattgagagttatgcagacccaggtaatctaagggtctttaattttttgcttttgtcagaagattgtcataccatagcattctgtgatttcactggatgtagctgttgactttctctacaaattagtgcaaaataactggggattttctcacgtcccactggttgaactctgagcaatgtgtgaaaattatagaaccatcatttacagttcatcaaagaagaaaacatctctacagctcatgattttccacatgtaccagtaaccacaggaagatggttccctctcagtacttggagctactcacagagccgactcaaggggtggtcggccaggattctcaccaaggacctggccacctctcctccatctcatctcagccttgcacttgctgtgcatggaaagtctgggctgtgagtgacaccaaacaaaacccccaatccaactgatatgagctaacatcactaaaaatattgcttctctcatccggtccattctgccttacatcatgtttttagtctttagtttcagatccatatacgtggcccaggacaagtctagatcctccggtcaagcaataagacaacagacaccctgccccatccaagggaagagagggcttctttctcatccattcggtcttgtgggaaggaaaggatgcttttctttccagtacccctgggctgggattgagttccatccccgaccctgaccgtgtgctgagggatgagcagccgtgatcatcctcagtcctgcggggccatgcatggcacagacaggcgtcctcccactcaaaccccacacctgagggtggaggatgggggcttcccaaaggaaatccagggtcccaaatggacaagtaggtactcacactctcacaattcttccaggactcctcaaaactcactttaccccactcgagcaggggagactctactagcagccagccaggcagtcggggagttgcctctaaatctccctcgatggagatttttttttttttttttttgagacggagtctctctctgttgcccagtctggagtgcagcggcgtgatctgggctcactgcaacctcctcctcccgggttcaagtgattctcttgcctcaacctcctgagtagctgggattacaggcaggcatcaccatgcctggctgagttttgtatttttagtagaggcagggtttcgccatgttggccagactggtctcaaactcctggcctcagatgatcctcctgcctcagcctcccaaagtgctgggattacaggtgtgagccactgcacctggcccagatggagatcttaaagtctacccttttagcgattccagccccaggttgtgttccctgaaaacagaggccacatctggcttatctcccacaacccccactctgccccgatgcagagcacggagtaggcacccgatgaatacttgtggagttggattgagctacgaatctccatgcaaaactagatgacatttgcctccccactgaaacttcagtaaaattgaagtgtaaggctgagtaccaagtatgaatgcaaacgtccctctatattatagttattcaaaagctcctagagccaaaaatgtactgcctttttttgtaaaataagatggctaattaaattgcatacactttctgaatttaaaaaaaaaagctgtaaaataaacatctgtgcacttgaggcgcatccagcaccttccccgccagtcacatgtttatcagctaggaagcagctgactttgcagtaggtaacgtgccctcattgtttacagtgcaacccaggtgaaggcctggacttacggactcttacactgctacaaaaaaaaaaaaggaatctgtataaagtcaaggcaaacttctgcttttctggccaggcgcagtggctcacacctgtaatcctagcactttgggaggcctagacgggtgaatcacctgaggtcatgagttcgagaccagcctggctaacatgatgaaaccccatctctactaaaaatacaaaaattagccaggcgtggtggtgcatgcctgcaatcccagctactagggaggctgaggcaggagaattgctggccacccgggaggtggaggctgcagtgagccaagctattgtcactccactccagtctgggtgacagagcaagactccatctcaaaaaataaaataaaataaaacctctactttaaaaaaaaaattgcatgtgttttttgacaccttcgtaagtctctggttgatgcatgtagacctctcacaccttaactagcagcgtgcatggcccttctcagctgccttgctgtgcgctgaaggcagcccattggtttttcaggttgacgctctagggggggaaattagcccccttatgactcctgctggctgaagcagggatccgtgttatggaaggctctggcgtctttgtttccagaccaccactggtgacaggcgttgggcgcacgaaatgagccattagcaatgggtggcgcctaatgggggcttacaaagtgggccgaccccagtcccaactgtgttcacgtggatgatgaagcactaggaccatgactcctccaggagtggatgtgagcccgaggccttgcaagtcccacaccccaacaaacagcaggacccgaggacctgaggataagtcagagtctgctaaagagagtccgtcctgaagcatggattccagacctcatgagcattagggcttctcccaaattaatggacaagggcactatccaaaaggaaactggagccagggttctggcctctgtgtgctgtaggcaggggagggagcaggtagggtcttcctcccaggagtcgccttgcttcccgctggcctggtctgcagaggaggcagcaggctcacccaggcaggggaccagtgggatgtacttgccagggcctggctccagggatccgtgcatgatgtctcgccatatgtattagtttcctgtggctgctgttacagatgagcacaaaccaggtggcttcaaacaacagcggtttgttctcttgcagttctaggggtcagaagtccagaatcagcctcactgggctacagccagagggtcaggagggatggctcctcctggaggaccctggagaattcatttcctcaccttttccagcttctggagacgtgttcctgggctcctggcccctcctccatcttcatggccagtgaggcggcctgctctggtccctctctactccaacatcacccctcctcctgggatggtccctcctccaccctcatggtcagtgaggcagcctcttccggtctgtgtgctccgaagtcacacctcctcctcggacccgccctgcttcctccctcctgtaaggacccgtgatgatgccctgtgcctgggctgcctccgtgacccagggtaatctcccatcccaaggccccgactgcatcagctctgccagggtctttggctgtctgagctgtgttcctaggtcctagggatcaggacatggacacctttagggaccgcttttcagccccacaccatgcttgtctggaatgcctggagccgctaccgtgaggtggaatcgggaatgtggcagctcagccctttctgctgagctcccgccgtctccccagccggtagacctgagccacaggcacctcctcggccctggctggcctgcctgagggtcccagcgttcggcatggctgagctttgccctcaagtctcagccatcatgtgggcgcctcctcagggcagcctgtgggaagagggtgctcccagccctccagcctggctgcgggtgatccactccctgttttactttgctcgtggccatcattaccattggcggcatgctgcccatgccttgtgtgtgcacggagactttcctgtccacctgcccctccctggtcatcccaggcctgacctctgcagcttcttcctaatgccgcctccccacctccaatcacagaggcacacgcggctttgcccttgatttttgagatgtttgcctccttatctgtttccatgagccaggtgccctgcacggatccgctctcctccttattgttcaagcgcagtgaaaaaggcagcgtgagccctggggctttcccagggccatccccctgcctggggccctgtccgcaagtccttctcagaaccatcccatgtgcctgtccctgtggccctgggctccaggctaactctctggaatgttccaacctggtttctgggcaccagcagttccctttggcctgtagacttccctcccagtgcttccggggagagtctccccagttgcacccagtgccctgagagctgcacctagagcttcttccgtcccctgcagggcctggtgcggtggagcccaggcagtgctccctgcacctgtcaggagcctgtcttctgaggctggggacacaagccagccctgcaggctccacttctccccagatgtcctgttggtgcccagcacgcctgcccttcgtttctttaacagttttattaaggtgtaatttacatgccctacactccactcatctaagctgtgcaaatcaacgatgtctacattcagagttgtgcagccaccaccccagtccattttagaatgttttcatcgcctcacaaagaaactccacacccttggctgtccgccttctgcgcccccatggcccccggccctaggcagccactaatctactttctgtctctgtcgacttccctgttctgggcactgcgcatgagagaattgtacagtgtgtggtcctactcttggttttccagatgttcttggtgtttgtggtggaggtcagaggggaggtgaagagaagagggtaccgtgcaacagaaggctctgcggggggacagagggctctgcggagggacagagggctctgcgggggggacagagggctctgcggagggacagagggctctgcggggggacagacggttctgcggggggacagagggctctgaggagggacagagggctctgcggggggacagacggttctgcggggggacagagggctctgtggggggacagagggctggacgcaagaggtggccaggtggccagatggtgctggccccatggtcatgtctgggtgcttgcctgtccctgtgcagagagcagtgaggagcatcagatgtttgaggggagacgggggttgtcacacacgcgttctgtgcagaccattccctgggtcccatggaaggcatccaggggcaggggacagaggcagctgcgaggtggagctgagctggcatccagtgggagcggacaaggctggggtgaggggttgtccctgggagcccgtgccctagagggactaccccacacatggctgggtgcctggcctgatctctctccactttcctcgttgacatcacattgccatccttcgttccctcctcgtttaacatgtaggggttatcaactttgatatcttattactcagtgtctatgagactcctctcctgcctgcccacatgtgtctgcacctgcactgaagtgtggacagcgtgtcgctggatggaccagcccgtacagccacacactccttcaagatgacagagtgacttttaaaatattcactggggcaggacacggtggctcacacctgtaatcccagcacttggggaggctgaggcgggtggattgcttgaggccaggagtttgagaccagcctggccaacatggtgaaaccctgtgtctacaaaaaaatacaaaaattagccgggtgtgctgttgcatgcctgtagtctcagctacttaggaggctgaggcatgagactcacttgaactcaggaaacagaggttgcagtgaaccaagatcacgccactgcacttcagcctggatgaaagagcaagaccctgtcttaaaaatatatgtgcgtcagtagagaggttccctgctaaactccttctagtggctttcctacatcaagtctctaaatgttgcagcctcagacagctcttgcacgtgccttccagagtctggaatgttcgtcctggcttctgggtactgacagacagcatcgtcgacccctgcagatcaatattgagaaggtctccctcagagaagcctctcagacaacctcacaaactagaatccctgccctttctgctcatcccagaccgcatgcatttccttcctagctcttctcgccctaacagttctgcctgtttaacaattgacctgtggctgctttctcccactagaaagcccactccatggagtgggagagcccctgtcacatccgctgctgtctccagtggacagcagggtacctggccacagccttggaggtattgggtgctgggggcacctcggttgaataaatgcatgaatagatttttgctaaaacaatgataaaatataacacgagctcagcagataaccctgtgagaatgtgtgcttagtgggggtggggcatgtggattagagaaagctacaggatcaagtttagggggaaagataaccctaaggggaaggaagcagggacccagagcctgcagggggctgacagctgcgaggctaacgcacggggcgcgctgcctgggccagcagctctcccgcactgcacacttgtcgtctgcaggtcacagtgagacccagtgagatgagcaggtgtctgaatggagcctgctcctaggagcaggggcatttccctggaaagccatcgccgatgtgaggcccctccttccaccgcccctgcaggcctgtgggcaaccactgctgcctctgagagctcgccaggcctggcttccctccgcttctccacctgcatgtgacagataaggaaaaccaggcttgagagtgtgagaatcttggctcagggtgaccaacacggtaagtggcagagctggatcccagccacaggtctgctctgaaacgttccaataaaacgatcctgctgaaaagcaccatcagcatggatgggtgctgtgcagagcagcaaggctcactccagccgaggggctattggtcatttccagcgttttcctttgaccttggggaagcccttcccaccctcagtctttcttgccacaccatccctcttacaatcttctcctgtccttcaattctaaacccaccagcaagattgctttcatttgttagggtcctgttttagggcaggcctatattatttgatgtacagatatttgtgttttataaaatgcctattattttgtgccatttctgtcttaattttcagtctccatatttagaggaagctttatctttctgattatttggtcaaattcaatttaataggaatttattgagaatctattgttggatactcccgaacttggtggagccatttgagttgatgatggtcatgacggtgatggtgatgatgatggtgatggtgatggtgattgtgatggtgatggtgatggtgatgattgtggtcatgtggaggatggtggtgatgatggtgatgtggtgatggggaggatgatggtgatgaagatgatgatgatggtgatggtgattgtgatggtgatggtgatgattgtggtcatgcagaggatggtgatgatggtgatggtggtgatggggaggataatggtgatgaagatgatggtgatggtgattatgatggtgatggtgctgattgtggtgatgcggaggatgatggtgatggtgatgaggtggtgatgaggaggatgatggtgatggtgatgatgtgatgatgatggtgatgatgatgatggtgatggtgattgtgatggtgatggtgatgatgtggtgatgaggaggatgatggtgatggtggtgatggggaagatgatggtgatgaagatgatggtgatggtgatgattgtggtgatagggaggatgatggtcatgacggtgattgtggtgatggggaaatgatgatgatgtttatagtgatcatggtgatgatcatgatggtgatgataatgatattaatcatgatcatggtcatgatgatggcaattatcatggtgatggtggtgatggtgatagtggggatagggatggcagtgacaataacagtgacaactgcacctaacactctccagcactgatgggtttcccagcacagttccaagctctttatgtgcattaacttcatttgatcctccatttcctttcccagctgaccccataaccagctagggcaccacatcttccacagttattgtgtttctgtggcctccagccagggagtgcctgagggggtgttaaggtatgggagaccctggacgtgaggtaactcaaaggcagatgcccttacagtagcccacccaggtcttagcacattttctgaaggaaaattaagcagcatttgatccttcatttgatccttttgtagacaaaaaacttgaggcacaggaagttgatcagcgtgactttaccagggttgctcagccagtgagtggcagagctggtatctaaacccaggccacctgggactatagatcacactctcaatcaccatcctgtttgcccttggaaaagtcaccaggttatggagagacaagagacacacacagagagagacagagtgagagagtaattaaataacagttcaaaaaataatccactgaggcacattatttaatttatcattccataaacatccgagtacctactgtgtactaagcctggggataaaatcatagataagcagccatgccttcacagagcttggaagcagaagggagaggctgctctcccagcagcccctggggtgagccgtgctgaggaagaagatgtggctgggaatatctgcaggtcagaggagggatgtcagcagaggctggaaatggtgggcactgcttctcagcatcagtaccattgatccaagtgctgaagaaaggccgagaatccaagagagcccagtggggaggacaaggaggaagcctccaggctcggggcaggggagagtgggaaacccacggggaaggtgaggaaggctgagcgcttgaaggggggccactgagtgactggacagggccgggcaggtggacactgtcaagggggatgctctttctttctccacctctgccgtctggtttctaccatcttcctcattcccagagcccctgggacgcctgcccacactaagtgagggacagcaggggcacagcctgctggattttaaaattagtttccaaatcagtttgaccaagataacattgaatctgaggcctgggtcttcctgcagagctcttagtcctgggtcatcccgtcggaaactgcagtcctgcttcctgaggcagggttccaggccgagcgcggggaggttagggcccagggacaaaatgattccattttgactccgctccttccccagctgaccccataaccagctggggcaccacgtcttccacagcgattgtgtttctgtggcctccaaagggaccctggctgtagggtaactcaaaggcggacggccttacagtcacccaccgtgttctcagcaccttttctgaaggaaaattaagcagcagaaagcagccactttcactattatttattgtttttttaattgcacaagcaacacatgagtgacttctcatcactgaaaactcaaagtgtacagttcaagcgataatcccccactccgcccccgcccaggccccacgttaaattgattctcacctcggagtcaaccggcgttttctgcttcatgtgtttactttcctgtgtggctaaaaatgtctgtaaaagtgtacagatttgttttccgtggcattttaaaaacataaatgatgtcctggtgcagctgtgcagaacttgctgttcacactgaataatgtgccttcgagggccttccgagaagccagcgtgcagagacttagccaagcgcttagcctgccacgacccttctggaaatgttacctgttattattattaattgtagcaagccaaaattgggaaagaggctgaactgggatttgtagactggggaaaactccagatttttaaattggtttccaagatggttaaaccaagataacaccaaatctaagaactaggaaggcgtaggtctcgcagcctccatcagtcaagtgatttgcaacgctggtcctgcttccagaaggtctgggcacagcgggagagaggcacaaggccgattatttctctgttctgttcagctcgtaccaaggaccagctctaggccctttgcagggagagaaagaaaaaaagaaagatcgtgaattctgagtggagtgaccagttccagacacgagtagccgtgttttacacacttggccaatgactcattccccgctgaggggaaacgtagtcatgctgagatctgtggagcccgtggcctttggctttctcaccccagggccctccccctcccgagaccacactagcccgctgctcaccatccccctttctcctctgtctccagtgcgtttatctttcattcatcattcctcgcaaacaccaccagcccaaggtggttctcagccatttggcctccgattccgttctgtctttcccgagaaaagccgacaaaaccttgcacctcataaattttaacagcttttccaactgatgtatttcatgtctgaattgttttatctgtcctactttgattgtaagcctcgagggctgagacctcgtcctgtttcatcttctgtaccgctccgagcgcactgttggcattctgttcgtaaaaacacacgcggagataaatatatgcaaacatcgataattgttttagttggagccgtttgacgacagatcagagctgtgtgtggacccctacatctgaggctggagcgtgatttcaggccacctcttaatctgttccttgggtattagtaatttgtaaaacatgatttatttgcttagaatttttcctcataactttaaatgtgtgcataatagtaaatctctgatctctgattaacttttgccaaataggcttcccagagtgatgaatgcttgtgtggtgactcataaacaagactcaaagcatttgtttaaaaaacacgaggcttccttctgtctaagcatgaagagatgttaaaacgaaaaaggttcaacttagacttaagacagacagaaattaatcaggagtgatttcttcttggtctgaattttaaattgtttgtgaaagggtaatgatcgagctggctttgttttactccacttcactttgtttctaatgtgtaaattttcagatgcttttctgctagaaaattcctcttggtgaatatgatgtgcctatcctcacataattccacaagtggcatgcagaaaaacagggtgagtcccacaagaaccatccaaagctcttgccttcactctgtgtttgctgaacacccactctgtgccaagtaatgtgctggatggcaaggattcatggttgacattgaaagacaaggttcatatgtatatatgtgccatgctggtgtgctgcacccattaactcgtcatttagcattaggtatatctcctaatgttatccctcccctctccccccatatttaactaacctgcacattgtgcacatgtaccctaaaacttaaagtataataataattaaaaaaaaaaaaaagaaagacaaggttcagccccagggagctcccagacattgcgtggacaaacagagaacagataatcaacaggattaacaggagcgatgggaatggtgctccttgagagggggcggccaggaggccagggtcgggaagcagccgtgcccagctgggagagggagtctcaggcagggtgagcacacaggccctgggtggggaaggactcggtgggctccccggacagaggggagttgagcctgtccttgttatttcaggagcaacaggaagcacaggagcttaaacgattgtggttcctctggctgctgtagggagatggacgtggagggatgggtggggggaggaggacagagaagtctccttcaaggagatccccagagacaggaatggatggggatggggccagtggcctagagttggcgacaaaggaggagacacctagaatacaagcctgagctgagtcctctgatgggagatttaaatatacttttgctcgtgatcacagggagctgcgatggcccagtgggtgggggcagccctggcgtttcctgcacctgcagcaggagggtcaggttcaggcgtctactcacacccgaaggagggcactctctcccgatctgcgacagtcagcccagcacccatggctgactctttgacaagagtctttcttctttatagaaaatagaaacacgtgtctgcgtgctgcagtccggaacagtggagctgctgaaatcagcagatcgtccatggctagggaggagagggggctggacagggcctggaaccttccctctgccaggctctgacctcaggcagcctcccagcctggggacttgggtcgggtttgggagcccacgtttggctcagtgggcccgagtcagagacgggactgcagttatcacacccttcaccttcgtgatggtgttgagtccagtcgtctggatttggggatataatttaaatacctgaccttttaaagtgggcactctaaacaacctacagtgagtgcctgccaaagccttgtcttccctaaatctatgggggggggggtccccgggtctccaggctccagctccatgtgatgcttcctgacatgagggcagttggtctccaccgccaatgctgagccatgaacagcatccagatggcaccctcagaggcccagggagatggctactttattccccagtacaagggctagccctactgataagtaccagggctagatccactgataggtaccagggctggatccattgataagtaccagggctggacctactaataagtaccagggctgcacccattgataagtacaagaggcggacccactgataagtaccagggctggatctattgattgacaagtaccggggccaaacctgttgataattaccatatgagacatcaaaacccagacatttgaaaagtagtgattaatttgttttaaactatcagcaataagcctattccatgttaacataagtaatgtattttatgaaaacaaactgtgttttccaaaacaacaccagctgagtgagacattggcattgtgctacatttttgcaaatctcttccgtgtctggtgtcacagaagctggctgggttctctggggtctgcttctgtttccactctgttgtgatgcattgtttgggttgaaatagatgaaaaaaaaatcagcctcactcaggtgtgtagatgggaagggagggtcattttaatctcctcagatgattgtggatgttattcttcgatgttacttcaaaagtcaacaagaggcagtttcctgtttcttaaacgttagttgcagcatgaaagctgaagtcgtgtcattgaacttctgctctgttctgctaaaccctattggtttctgttgttctctgaatggatctttaacccatgcataattttgtagcatcatggattcatcatatgcaattggttttctgaattacgcaggtcttccattatacggcagtttaaaaaaatgacgtttgttaacatcaccaccagcctcatcagaaaagtccttcattattgggaagccattgagcttgccatggcagacacaaactttccaaaattctaagttttgcttgaaagctctgtttgtccttgcagcaaataccgccaactgtttgcctcaaagcaacagactgacgcgttccttttcaattagctatctgcctaacagtcaaacatgactacctgctgcttgtctgtcaatccttcttttaagcaaaaacaggttttccacaaagaagtggctagttgagctagcaactcaaaacagtggttcaggtgctttcccccagccatttactttggtgtgagtttgtctgtacttcccattttgtcacatggagtaataagaaatatatttaagagtcaagaagtcaagacttggtacaattgatttcaccacttctacttcactaagaacattccctagtggaatgatgtttctcccatggccccagcatggtgaggcagagcaagaggaaaactgggcactgctcagggccctgcagtggttccacaggggcgcccgtcatccatgcaaaagtagccaccgtgaaaatggccaatggtatggttttttaaaatcaacttggttgaaatacaattcatatgccttaaaattcagacttggaaagtacaatttatgatgattagtacattcagagttgtgcagccaccaccacaatctaattttagaacattttcaaaataaagtgaaccccacaagagaaaccccatccctattaagcagtcactcccctttccccctccaccctgcttttcctacaggcccgagataacaaccagtatactttctgtctgtggatttgccttttcgggataccctatgtgaatggagtcactcccacgcagtcttctgggccacccagcacactgccgtcatggttcatgtgtccagtgtcattcgtactcactttgtttttattgcagaatcacttcatagtgtggtgaggaaggaaaaataatgaccccccagatgtccacgttgtgatccctggagcctgtgaatatggcatgtgatgtggcaaagggacttcgtgggggtgacgaagtttaggaccttgaaatgatcccgggttacctgggtgggccctaagtgcactcacagggtccttataggaggggggcaggagggtcaggtcagagaagaagtggcagtggaaacagaggtcaaggtgacatggaagacaaggaaatgattctacccagaagcctccagaggggcactttagactctgacctgcagaactgtacggtaatgcttgtgtgtcagtttaaaccttggagactagggtaatttgttacagcagcaaaagtaaactcacacacgctcatgggctacactttgtccgtccttgcctgggctgatgcacacagggtgtcctcccacttcctggctgttagaagtaaagctgctgtgaacactagtgtgcatgcatttgtgtggacatgtgttttcatttctcttggttataccccggaactggaatggtggctgggtcataggataactcacactgttcagcattttcaagaactaccagcctgctttccagcatggctgtgccattttccattcacaccagcaatgcatgagggctgcagttgatccacatcctcaccaacacttgctatattccagtttcatgttttagtttatcccaggggcgtgcagcagtgtcacattgtgatttagtagatttttcagaatgagagtcactcagtttgctgtatatgcttaggacaatttctagagatgttgaatggtggatttttttaagacttttcaccagttatggttgtttctctggggacgaggtctgtggaagtcctcatgcctccattctggaagtctcttgaagcaacatctgaatgttattgtaaagattcttggacatagtagaaccccctggggatgcccgggagtctgggccgtgcctggcatgcagctgtaacattcgttgaggtgcgtgctgctcaccaagggtccccccagcagaacccagcacctcccgggcagggattggggttttgtttgctgaagtctccccagtacacagtcgacattcagaacctggtgaacgcatggatgaaatgctgtgacgcatgaggaaatacagattcagaggtgggagagagggaggagggagggggagctgagctggcggggaagagggtagggggaagggttggggaagggtgtgggaactgacctgagagggggaagggggtcagggcaaagagggagggggaggtgagctggggggaagagggttggggaaagaggggggaaagggggtgggggactgacctgagcaggggaaaggggtcagggtgaagagggaggggggctgagctgagcaggggaagagggtgggggggaagagggaaggggggctgagctgagcagggaagaaggttgggggccacttccagtgctggtgcctgacgcccagagacaggccagacactgttgccctagatgcggagggaggacagtgtgccgctcattgggcagcccccaccgggcccacctgggtctgccctggctcctgtcactgccaagagaggagaacagaactatcacatgtgtgtcccctcaacgtcaacagcagccggggtttccaaaacggcatgctgtgcatggaaggactgtacctgggagggtgagtggggcagctcagtggggctcgagggtccttccaaccctagacacctgctgccgcctttttctaaattgctgaagacgccacagccctgtgactctgcttgtgtgcgtgcttctagcagggagaataaatgtgcgtctttaagaaagggcctagacttccaggttaggcagtgaagacgccgccgtgtctgcagagcgctgggtcccctcggcccccacacagatacctgaggaaatcaagacatcttcgctgacccacagacactgttggctttttcaagacagacaaatagaaggatgacatcaatagctgatattcagggctttactttcattatctcatgaagtcctcagtgtggccatttattagttcttcattcattcattcattcattcgctcactgtttattgagtatcctctttaccccagcgctggccatgcactgagggtgcagtgaccgtgggctccatccgggcaccctggtgctgtcattagctcgtgttgcacagagtggttggtcacatgtcaggtcacgcagcctgtgggcagagaatcaggacctgtgcagcgccccaggacctcccacccttgggtccacctgagcacaaaactgtaggcccttaggcattcctgagtgaacctccctctgctgccaatgtctgggtatgtcctacccagccctgcatgtgtgaggagccaagccctgctgtgacctgtgggcgggaaggacgtgcatctgggcagatggggcctgccctacctgagtgtcaggtcacagcagagacgtggctgctgccctgagcagattccctttgcatggagtgtgcccgtcagggctgccttcctgacagcctaatgagctgcctgtgttgactgcgggatccttccccaccaaacgctgtccgagaagtccatggacggaaggacgggctgtggcaaccctgcgtcgtgtgggaacaccccgtggggccctcccttttgtgtcccctggaacaaacaataagaactgcccaggagttaacgttttctgttacttctttattgtttttttagaaaatgtttttgttgattcttctgtagtcatttagagaacgttagccatggttccgaggcaccacgtgcatgaaagtagcgaggctcgtttcgatactagaggcggcccgtctgtctaagcagcgtggtgtgttgttggtacactgcagagctgggccactggatgaatttgtggactacattttgggagcacgtgggtgggaaagatgaactatcagggaccaggctccagtgctgacctgaggcagccatgagcacagtgggggtgaatgattcccgcacggcttcccataaaaccctgcctcacataacgtttgtccataaagtcaatctccctgggctcagggcaaggaggggccactcgctctcagctgcacattgccccttgggcagctggaatgtgcaagcttgtcatggagcatcctttgggaacacacagcttctccatgacagagacagtgccgggaccaactgtcctcagagcatgaggccaagctggacccagctgagttaaggagtgtccaggcatgggaatggcattcagtgctgggataaagtatttttggtctttacctgtaaagttttctttcctctttcccctaatgacttcccgccccctgaaaatgaaggaatggaagatgtagctattgacaggtgcacgcgcacttctgaaaggcatcttgggtaggagagggtggtgcacaattggtggctgcccagggcatggactggctcacagggccacaggaggggttactattaggattgcatcatctgacctacacacccaactcatcgtgtgcagaaaggaagggtgtcaggagaggccccctgcacactgctgggtgcatggggagggcaatggctcttatgcaggtggaagcagcaagtctctgggccatgagtggtgctcatcctggtccccaatgtctgtaagaaaagaggtggtggaagatcaggggcagtgatcaccctggctgtaatagaaacagtggctaatgtttactgacgggttgtaccacatcttgaacaccagctctggtctgggtttgggatacagctgtgaacacaacagatgaggtcctggaaatgctcagatttcataataataatgatgaataacatcatggatggggctgatcactcctccgtggggctgccctggactcctttccagactccttcccacccaggcatctgcatgtcttcttctgaagctgttttgtgcccttgatcctattagcagcctggtgcagcctgtgacccgcccacctttacataataatgcctcacatgcataaagtgaaacacattgactcacagaagcaaataatcatattggcatgtagttatcaaaacattaaaaacaagtctgtgaggtaggagcatctttattaacgcgattagtaacaagagccttcagtgggcctgataaatgtggtgatttcaaggtggtgccaactataaactaaatgtcagatcatctgcaactgtgctgggagatgagcactcacaggaggctgctgttttcctggcgtggtgcccacattcataacagaaggaaacattaagtaagaggggaataaaagaggtgaatttgttggtcgtccaagttcacagagccctgggttccatcccccgatctacagactgagaacccttggcccagaaggtctgttccctccaccctgcacccacctcttgcctctgtgccccctgcgctccttttccttggcatctttgcaagccccgctcaccttggggtatacaaggattgtgcctgtccccacatcgtcctcaccaccctctgcctggatttgttttctgcctcctggccagcctggctgcaccttccaccttccccagtacagattccccaataccccagctgcccataccttctggcagatccagagagccctgtcctggggcatcagggcgaacagaggggccggttacttcatgcatctgcacaggatggaccgggcgaagcaggcagggctctgctgaggagagggaggggcagagaggcagagcggcccaaacaggacaggcagggcctccttgggtgggtgggaggcaggggcagcttcagcaggggtgcgccttcagcgactctcacaggagaggggcagggtggcccatgaaggagccacatcaacctgaggtcaaaaatgttcatccaaagtggacaaaacaatgaaagagccaaccacaaacaagaccaagcctcagatgcagccgggcgtggagtgagcctcagagggcagggacggaacccaccagagactgaagggcagggtggaccagcagagaactctttcctttttcctattttctccaagtttttgctttaaacacttattcattttgtaattagaatatgttttcctaaaaagcccctttagggctcctgaattgtcagcaggttaaatcccaagccccttcccacctccgtctcagtgaacacatgccaagctcttgtcaatggccagacacgccgggcactgtgggggtgatggtgacccgccggggacttgcctcttgggggcatgctggatgggaagaccccactgccctctgatctgctgaattgctgggatgttttccttctagcaccttccaggaattggctgctgggacctctccaagcccctcccacccaccggcctgcctgcttcccatgcctgcctccaacaccagcccctgccacccctgctccctactgggaccccacccccccggccactgtcacctcaggggctgctccagaggtcatgcaccccccaaaacccccagcccaggacctcagcagagcatgctcctccctccttccgtactatggctcctgctatctgtggcctcagcactcgcctttcagccagagccacaccccctcctgaaacaaaagggacctgagtggccgaaacagggagtgacgacccctgcggtgccggcagtaaggtgtggagatacccctttccagaatcgcgtgtggggaggatgtgcagagggagcccccacctcccacccgaccctgggaccagttttcctgtagaacggggactttgccgtctgtgccttagccacaggccagatctcatcgtgtttctcaccctcttctccacgcgtcccagaggccaggcttgctgacgcacccgagggactggctgcggggcaccccacatggcggggtcctccatggaagtgtggtcggagtacccgaggccccttccctactgcaggcactgcccgccaagcttccctggatggctcctccagggctgacactgcgcagcctgggcgtctctgcggtcagtgagggtcgccttttttatgagcatcttgaggtccgttgggctaacacgagtccctcagtggtcatgggagaagcctcaggttctgtcagtgttgcctctcccttttgaataaatttgacgatgctgacttcttgacaccacgtccctgggaagttcccactctccttttcagggacctccaatccgcccctgcaggttggtggatctcccaccatggtgctgcccctagaggtcgctcttggagagctggcttcgtttccatgtcctgctgatcactcccaccccgccctgccatgccattcaccatctctgcagccaagggctgtgccctctttcacccggctgagcgggcagctgtgccgggtgtcggactggggacctccttctgctgggggactctgcagacaagagggggcacgctggatggatgtgcctgagggacaggcaagtgtcaggtggcagagccaggcctcggccctgccctttctcacccacaatgtgaattcatcagcaccctgagtgtgcactcagcaagggctttccaaaggccgaccctcctgacccccctgaccccactgtggctggaggtgtggggagcagcaaggggatacgtggaagacagacctaagccggccagcctcccaggcggggcagcccccagatcagtgcaggaacatttcagcagcgcaggcaggcggcatttccctccaagacaatagccctgtcccagtgaaagacacagagtggagaagcctctcgcgtggtctctgcgtctgggctccttcatctgccgaggccccgctcctcctcctgacgcggctctgcctctcccacgcactggcgctctggctttcttctttctccctctgccttaatgatgctgcccctttcctgttcctggttgaagctgaagcccgcttcccttcgccgcacacaacacaggagcaatcttctcagccgtgcactcacagcttggaaaataaagggaggaaggagtcccagccacagggtagaggaacggcctctccacagagaagctgctgctgctgagctgaagtgacaggtaccccgtgctaatgatggggaaagtgtgaagggtttattataatttaagagcctctctatttgaacagactgtctgactctccggggatggttttcaaaaccagctggctcctcggatgctgctgagaatgaaatggggaagccgtgagaaagcagcacaggtcccgcgcgagggcgtggcggtgaggccgctgctgcagaaccggaggcctgtgcatctaattttagtgaagaatgttatggagacagagggtgtcggggtcaatgatcacctggattccgggattccttgctttcccagctgtgagcgtgccgtatttcccagggtggggatggcccagtgtcctctctgcagctcatctcctgcgaggcacaggcatgttgtgattgaggacacaggcttcggtgcctggcagggtccttcggggtcctggctctggggccttgagggagtcactctagtggctgagcctgagccatctctgcaacgggagccatagtggtgctcaggtggcgggacagcggtgagaatctaattcagaaatgaatgcccgcaactcaccctgcgcagtgcctcagcccaggaagcactcagccagccactgctgtcttcacaactattgtccctcaggggattcattccaggcccgcccccaggggtattaaaatccgaggatccttaagtcccttgtataagaaggcatagtatatgcaagtaacctacacacatcctttgtatactttaaatcaactctagattacttataatgcctaatataatcaaagtgctatgtaaatagttagactgtgtcttttattattacattgtcacttcatatttttttaaatatttcggtcctcagttggttgaatctgcgggtgcagaacccgcgggtgtggaaagccagctgtatcttaccatgaccctgtggacttgtttccagtcctgcctgctgtctggcgagctcctactcagccttaggcaccttgcctgagtgcccttccctgaaacagcttcccttgtgtgttagtctgttctcgtgttgctataaagacatacctgaggctgagtgatttatacagaaaagaggcttaattgactcatggtcctgctgtacaggcatggcaccggcatctgctcagcttctggagaggcctcagggagcttttactcataatggaaggcaaagcgggagcaggcacctcacatggtgataggggagcacagagggggaaggtgccacatactttaaacaaccggctctcatgagagcttactcactgtggtgaggacagcaccaagccacaagggatccccatgacccaacacctccccccaggccccacctccaacactggggatcacagttcaacgggagatttgggtaggacaaacatctaacctgtgtcccctggcttccctcctctggtgcccagtgccccacacccctcacctgtgccctccctgcagatctccggagtcacctgggcagcctgcggcccaacactgcggtgctcctcgtcagccccggcctaaccctcggccctgctcttcccggggcctgttcagatgcccgcccgctgcccaccatgcaccctctgccctcctgtgtgtgtgcccacctctcccacaatgctgcagagtccaggggagggaaggcagagactgggccctgtctggcctttccctggtctcagttgagttgcacctggcggggcgcatgcagcccattcttcaccacccaggtctgtgcagaggagatggatgcattcccttctatgggcgtttgtttaggccaagctcagtccaccagtcctggtgcccgtggatgcccacaggggctgcacagctccattcctcagcatccagaaagcagtgtcgcgttcagttggaaacagctctgtagaaaagtcagccataaatatgagagacaggagcataccaggagggaggagaatggcaggacaccgtctgccctgacgcatgcccacagtgccgcccagagccaagctgcaggacgccaaggtaggggctggcaaagcgtttgactcccaagaatgcaccttctccgggggtggagctgcgccgtgccctgctgcctggcccatactgggggctgctggcgatgctttctggtgaatgcagcaggtcctcatcatgtgctgggctcggagggtgtccagctgagccctcccaggttaggggatgctgccagcaccctcgctgacaccccaaagcacacattttatcgcaaggttcttgctgcatttcagcgatgggctcactacatcacgcaggcagacacccggtccccagtagggtggaaaatgagaggatgaccttaaacttccagaaggaaacttgctctgaaaatgaccaggtcctcaaaggaaactcacatgtcttaacttccgggactccactgtcatgaacagctggatggacatcttggtgtaacaggccttgcttaggagggaaacgaagcagctgaaaaagaaacaaatcaataataataacagtaaaaatagccataacacagcctacacttctgaattttgcaagcctcattctttggggatgttttggtgagctggaaggaggagcagagggaagctcattccagctctttggggaaaaaccctgaagctgcagcccgttctctgcgtcgctttctgatgctgggtttatacattcactttattaaaaaaaaaaaaaaaaaaaaaaaaaacttgagcacctcctgtctcccaggtgctgtgtgtgccaggccagcaccaacatcatgaaatgatttcggaattgtgcctggcctggtgagcgcacacagaggagctgcttactggggtacacgcccgcagggcatttacttgatgaacgtgttacggtttcgcttctcagtgtggtctccagaccagcgaatggagagccttagagatgcagcacctgaggccccctccctggactcattttcaccagctcctgcgtgatctgcaggcgtcttagagaagctttggattaagcaaccattttgcaccttataccgtgcaaggcactaaggatacacgttgggagcgccatggcccctgccctcagaagctctcagtctagttcaagaggtggctaaacagaagcacagttttttattctctgggcacccctgtgagccgagtccagctcagggcactggggtgtggccagggatgacacggagtccgtgtcacagagttcccactctggttgggagacagatagggaagtcaagtccgtggagagtgtttgcaggaatggtgagtgtcatggagaaaacaaagccaggtgatggggtggagtctccaaggtggggcaaccagggccccacaccactccggatggcccctgcagagacccagctccctagggaagctggctgcagacagatctggacgaggagactctaggaaaacaaatgcaggcaggcagttgggcggctgttttgggagccaggagagggttcctgctggaagggaggcagggccaggctgtggaggccaggtgtgccctaccaggtgtgggaggggagacccaaagcacagggagcagaagggcccatcccgggccctcacctgctaggtcccattgtccccttcactccatgcccaccccgtctgcccagggcaggctctcaagtgtgcaaagtgccaatggagcacagagaagtgagcagcaaagtgcctggggtgccagtggaggcttcctggaagaggtgacatttgagctgggtcaggaagcctgcctaggtgttctccaggtagaataggaaagggctcaatgcctgtgaccttttgagtactaaatgagaaaataggggaaaataggggaatagataatgtgggaaaagcatcagggacatagtaagccctgggagtgttcatatacacatgtgggtatgcagtacacacacatgcatgcacataggcacacacacatgtacatgagcagggacatacgctgatgcacacacacacgtgattgatccttctttaaaacccacagggaactaccgcaatccccgtggccagctccctgccgagcctccccttacccacatcctaacagagagcctgggtgttgtttagatgctgttaactcccagtccaaagtgctgatgccattgtttccttcccgattagcttttgtgtccaaagctaagaatacaatatttttaggccctggaggaagaatcctgagtcagtgactgtctccggagtaacaggcccaaaagcttcagtcgaggccgagatgcaaacttcattatagtatctgccctggcggcagccgcagcgcctgtctttgcacctaatgggcctttttggacagtgacgatgatctccgatgagttattaatactgtgatgcagcttgaataattgcaagaaaagcacaggactccaaatgggaacatacctggcagtggaagaaatgcttccttggcctctcctttcagcatattcccaggcgagaggccagccgagatgagatttgcttttagggtattttcagcatttcaagtcttgtagaaatcatctccccacctcgtgggtaagaagggagggaagggaagtgaggggtgccctggcttgggaggtgtctcggtgtttgatgtttgttcttactgacgcactccttcctgcacacatttgagagcacacgtgcacatgcatccctctaacacacagacacgtgtagatttgtttttcctgtcatttcttggacaagtcatttgataaatgggccgttcttccatccagcagcttgcactaatggtctaattagaagctcctggtgaatgttgctatgggcgtcacttcaggagaaatggaaataggccagggaccctggtataatttgaggaaatggctacaggaagagagaggcctggcctggaaggacaggttcctgctgtcaccatcaccacctccctgaataggggctgcgtccaggcttgctggggtctgggtgaaatggttccattatttcaagctggaagttttggtgcagacagtgtggaaggctggcctctcgtggtgcctgttttcaagtctccatcaaatgcaattccacgcacttgggaagacgtcacccttaagattaggcaatgagtgtgagttactgtgattggaagtaatgacccctgcctgccactgggcacaggtaggcagcgaggtatctgccactgaggaaatgtggctttggatgaatgccctcggggtgcaggggtgacgaaggcccctctgtgaagcaaggcccagggccctgctgcctgtggggtgggtccttggtggggcccactctgcctctctctctctgtgtgtctctctctgtctccctatttgtctttctctccctctctgtatctctgtctctctgtctctacctctctttgtctgtttctctatgtatatctgtctccctctctctctttctctgtctctgtctctctatttgtctctccctgtctctctccccccatgtctctccctttctgtctctccctttctgtctctctccttctgtctctgtctccctgtttctccctctctctgtctctgcctccctgtctctccctctgtctctgtttctgtctctctctctgtctccctgtctctccctctctctgtctctatctctgtctttttctggcttgttctcattcactcttttcctgcctctccaaccctgcttttcctctgtaactcctttccatgaaacagtaagcagattgccgtgagaagctgtgacctgtggtgcagaattcaggttttgcacatgagtgaaggtccttgcaacatctagaatctggatccttgtacagagagggcaaaattttgttcccagtagcggtcaaggctgtggaggaaaaaaaaaaaaaaaaaaacaggaaaccaggtagagagtgataagctggtaagtcaaggacctcagcatgatttgcccctgggatgaggaggccctgggtggatggactctggagccaaacctctgggcaatgctgggcaatggcatcccgctgactctgaggacacatgggcccagggtgccttggagccagggctgcccgtgcaggtgatgggcatggcagagtcctgaggccgggctgaacggcaaagagtggtagccagggtttgcagggcacctccccctgtggctcaatgtccacgcagcagatgtggatagaaggtggccaagcagacagagaatggcagagagacggccattccgataagcaccacctctgtgccgggctcacttccaagtgctctgcgtgctgccattccttccacagcatgggggagagctgctgtgatcacccatcctacagacgagggcactgaggcacagagaggctgaatgacttccccagagtcacacagcaggtcaagtgggggagctgggatttgaacccagacccaggctgactccagagctcacctctgtcgcaaagcctgacagtctctcagctaaaatagggcccacaagtgccctgtcctgtgaacacagaggtccctctccctctcccagttcctctgcatatctgaatgattgctgttggcaaaggggccagacccccaggaagtgggcagatttgctgcctcctggtgtggcctcagtggcctgtcctgggaagtgcaccccgccgctcctcagttgtgtagattggaggcctccttggctgccatggcttgtgtcgtgcacacacctgctcagggccagtgacattttggggtctaaatgttgtaagtggaaacaaagcaaatttctaatttgcctgaggttaaatgactctgtgtggccttgcctgaaggtccctggtgggatggatagtgcgggacactgtcccctccagaccagctccaggctaccgccgggatgtcctggtgagcccagggtggccagaaatgatttctccgactggcctgcaggaaactgagtcaaaggtctgctgagtagcttgggacagggctgaggagggatagagctgctggccggtctgtggtgggtgacagtgatgtgtccatatcctgctctgttgacctttacaaccttgtggtaacaccatcaccgttctaacctgcctttgccacacagacctgaaacccaggcaccaacctgaatatacaagttggatgaaaaaacaaacacacccctcaatgtaggaccagacagatttttaatctgcgcacatataaaggtggatttttccctagccccagggtgcactaactgagatgttttccttgctaatatttgtttgcttttttcctttcataaaagcactaggtaataccatgaccttctgaaatgcaaatagattttctttttaattcagaaagcctttttattccacttaagatgagaaggtcctgtttggaaaatacacttgatgtctcatacccattatttatgattttctcctaaattatttttcttatagacttaaaaaaatggaaagcccaacacattagtgcagaaagagggaacatgaggctgaaatggttggcagctgcaaaacaggcaacgatgtaataagattagaaaaaaaagcatctctttttaaggagtttttccgacacctacgtggactcgcaatagcatcttagaggtcccaggtgaagaggaatcagcatcatcaagccagggccaaagacccacaacctgccagggccagtgttgtctttacctgggccaggctgccctcagagactggtttagctcctgcccaagttgttgctggatgatgcaaaggttgccttgggaaggtttctgcaggaataggaagcggctgtccttagtagccaaagacagaagggaggctggtttgatgcttttgttgtatggacagtttggaacctgagcctgccaggctttgcccgtgtctcacagtgcagagtctccctaccctctcaaccccaacacttgggtctacacctgaggcttcctcctctcctttccctcatccacattcctagaaccctgcccttgttagatttcacactccaccagtttacaactgagcctttcccctctctgcatctcccccttccatcattctcccctcgcccccagaccccagggtgtctcctgtgtttctgagaagatcctgggctgcaggacaaggtaaagccacacccgctgcggagttctagcctagatgtgtctgcttgtcataacgcttgattaaccagtccaaccagcatgcataatttggctgagagcaaatttatttctaagccacgcaggttggcagggaaatatcttgatgttatctagaaagtgttaataaatttaccaaatgggtccagtcaaagagaagttgcagctatcattctgagaacaaagagaagagtctatgaagagacagcccacaaagcatccctgtccaagtggaactgctacgaccccagcacgtgtccagcagcacctggccctgcagcctagagtcgtcaggaccctggacagttctccaggtctcatgcgtggtgatggacgattctgccccactgggcgttaaggactgcacttgttcttcctacttgatcctctcaattttgctttatggcatgggagtgctcaacgcagccaagaacgtggtccaccacagctcgcactgctcccctggttttgttcagaaagttctgcatgttggacgctgtgctctcctggtcactggcccaccacctgcacttcctcattgctctgtggttggtggtggtggtcagcaggctgcaggcgtcactgccacgggtatctggaggtatttgccaatgaagctgtcatgtgatcagccaaacgcggggtggtgagcacgacctcctagatcacagcagatgtccaccttccgtatgcagagccatgctggcagctggggccttggccaacgctgctgcatttgctctgtggcacctgcatcaagactgccctgtcgaggctaggctgttgcagcctcacgtctccgggagggctgttggggaagcacaagaccctgagctcagtgcccagctcctccatcttttcctgaatcacaagccagttttccttctcaggttttgcggctacagggaccccctcaagcatcatgtgtttagggtatacgaatgtggcataacattagtgcaatcaagccattataggaaggacatctcagtatgtctctctgaatcatcgttgtaaaaccaaacacatggacgtgttcccgttgcttgtgatggaatcactggtgcgtgctgatgtgatggccagaaaatgaccacagagaagacttcatctttcctgttgcagaatcccctccagtgtgtgctccaccgggcagcctttgcttggtgcttttcctgtgattttgcgacaagcactggcctcgtgcaatgcagcggcctctgtccagggctgcctagatctgcagaaggttgttttttttctttccagtgtgtgtgtgtttgtttatagagtactttcggcagctccttcccaagttgaaacaaattccaaaagaagtgcatggggtggccctcccctgagggagggacctcttggagagaaggtggagacccagcacacgacacgcagcaagttccacagggaaattccaggagatgtcacgtgctcctcattctctgtcggctgagcctgaaccaggcagcaggtggccacgcttggtcacctcgtgtcttccctaatccagtgggtgtgcatggcctgtctttgcagcagctctgcacatgtgcgtctcagcatgcacttgattgccatttgaatgagcttgtctgcgaattctccactcacatcctttgccatttaaaatttgtttttcctgtgtttttcttctatttttttctttcccattaatatgtcagttgtacatattttggggatatgtgatgttttgttacatgtatacagtgtgctgtgatcaaaccaggatcatcggggtacccatcacctcaaacacttatcttttcttagctttgggaacatcataattccttctggcaattttgaaacatacaaaaaatgatggttaactatagtaaccctactgtactatcaaacactagaacttattatttttgtctcacttgatgtttgtacccatgaaccgacctctctttattcctctcaaccccccagacacactccactttcccaggatctgacattcaccattctaccctctacctccatgaggtccatcattttagctcccacctgggactgagaacgtgtggtgtttgtctttcagtgattggcttattttacatgaaatgacctccggttccatccatgttgctgcaaatgacagaatttcattcttttttatggctgaatactattccactgtgtacatgaactacattgtctttatctatttgtccattgatggacaccaaagttgattccatctcttagctattacaaatgcagctgcaaaaaaacttgggagcgtagctatctcttcgagacacctgctttccttcctttaggatgagtgcccagcagtggggttgctgggtcatagagcagttccattcgtagactctgaggagcctccgtgctgttctggaggcggtggtcctacctcatgttccctgcagcagcatatgagggctcccctttccctgcctccttgccggcaggattttttctgttgggtgaggtcatatttccccaagtgttcttgatgcctgtggacatgtgatagtgtccgtgttgagggattaggtgtctattttagtctttgcagtcaggtttgcttgtgcctgtccttcagatacgaatccatttcctgagcctgtgacccctgcagccatctcagcactagaggatactgtaagtccaggctggccacaaggctatcaagggctccagagtggacctgcagaagacccagtaagggtgctggagctgtgtggaaatgctggccagggctcagaatccagaagaccgtctggtggcccagacggccatgcctcccagcaggtctctgcacaggcacaatggatccctgcctaaagcaagaggggctgcagctgagactgggccccctcaggctcttcggtggggtggaggctggagagcctggtctcattggctcagagggtgcacgtctcccagcaggttgggatagtccccaactgcagtgagtggggccggagctttcagccccagccccagccccagcccctttccttcctctccctggggatcagagggtggggcaaaaagttcccataatctctaggtctttctggtgaccagtcccatctgagaatatacaggggtccaccctaagtcacctcattagcataaactcataagcatagagacgctcctaacacttgtgaaatcccagggctctgggagctgagccgggaacctgggcaaagaccaagtcaatccctgaggatctgccatgggatgaggttggtgatcccagattgctgagcctgacagggaggctcagactcccagcctgcgggatgtgggcaaggctccctctggcttcctgtgtgagcacctctttgctgggacctcagctgagtggggctggagctgcacctctgggccacatttgggttcactgccaagactcatgtcagaggtcacaagagcttttctgccaacccactagcatgagcgattcctcctggacttggcaaatgtcttggttgcacgctcaggccaaacgaggctgtagccaagccgcttgggggacagggctgtttccaggcttgaaccgggaagcaagctcagtggggtggatcagccacctgggtgtggatctgagctctcaaaaatgactctcccacgtcttgggctccaccagggcttcacgaactcctgcctgaatctggaggctcctgcagagagacttgtgactgtggatgggcgaaaacttcttgttgtgtggggggatacgggcgagtcaccttctgtgtcaccatcctggtgacatcttcagctcatgcatttttcttgtggttttgcaaaggtttcttggatattacgcacattgttgattttgccagatagcaagtctccaatctagtacaattatggaatttaaaaattttttttgagtcataaaaatgtgcatattttcaagtacttgcaataatttaatatactcgtataatttgtaaagatgaaatcagtgtaattgggatatcccatcaccttaaatatttatcatttctttatgctggaaacattcacattattctcttttagctacttcaaaatatacaatacatcattataacctgtagttaactactgacctgtcaaacactaggtcttatttcttctgtcaaactgtatatttgtaaccaataatcaacctctcttcctggtacttttgtctatttttgaggcctgacgtattttgggtggacttgcctttttctcataataggatgctgtgggcattcctccttatcagcagctgtgcctctcatcccatgttaatgagggtgccatatgcatgctgtggttggactcacacttacccaaccaaggacagctgtccacatggtcacttttccatcaaacctgactttgccgtgggatttgttaagaccatccttcctgctgaggcccagagtggggatgtaaccatggccaattatggactttcccgaatgaaaagcccttcattccgatgttacagcttagactcgagggtctaatttaaggactctctacctagctgctgagttgaaaacagcctcctagtttctgctaatgtgacggttttgcatgctgcatttaggcctgtcacccacagggcttggctttggcatttggtgtgaggtagggattgcacacctctgcattctcctcattggtctctttggtctttggccgtttctctgcctaatgtctactacagggaactcagctcctcaggagcattcttccatcatctctgtgttgtgtacaaagcagaaaacgaccatgaacagccagccacacctccaggagggccgataaaggtgtgaattagaggtccctgcttgcccagggagacaagcttgcagtgtgaggcttctcctgcccctgccgagagcggtgtttgcctcgtctcttcatcttttctcacctccacaagtttcctcggaaaaaacaggggcttttcttcttctcctgccccctcttggtttcacactctctgtccccttgacagcccctagtctttacccaagtgcttcagaaaacaaacacactttaaagtcgtttaaagaccagagagacacagctgctgccttccaggcagagtgagctgggaggcttcattctgagtttctgaagtagctcatctccaagtggtgcagaagttcttgccagatctggcccagggccgtgtgcgtaggtcagtcagtggaggaaccccaagtgccaggtaacaatcttctcacctcctaatatcgccctagacacatgcttgtctctgtgtggagtatgcttttcttctatcacctccacagtggtgttagtcatttataaactgtccatctgtgtgcagaatctaggatgtggttccaaaaacaaaatctggaaaaaaggcttcaaaagaaaaaaaaaaaaaaaagatctagtgaactggatacctaaaccactagggaaataattaatttcaagaaggtaaaagaagcagagggatgatgtggggaagtcattggctgtgttccccttcactgctttctacttgagcccttgaatttgattcttgagctgggcatgcagtccacagctctttgtggagccatcgactctacagacttcttgctctttggagcttgtttccaacatcctgaagctcaaattggtgggagggggggctttggggaggagctcgtttgtttccccacagtggttgctggcgcttgatttttccaaatgcagcttaaatgtttgtatgtcttgggttccttgtgattgacaaacgtgactaagtctctggtgcagatgttcgtcctgcagaggcaggtgggtgtatgagaggagaggtggcagggacggacgtgtggtggaatgagaaattgacttagtctttgtccaggttcctggctcggctcccagagcctgggatttagcaagtgttacgagtgtctctatgcttatgagtttatgctaatgaagtgacttagggtggacccctgtatattctcagacagggctggtcaccagaaagacctagagattatgggaactttttgccccaccctctgaccccaggaagagaaaagaaaggggctggggctggaagctgaaccctgtgaaaacccctgaacaggaagatacagagctttcaggctgttgagcaggagggcgggcacctggagggcagggaagctcctgcgcctcccacacctttgccctctccatttgtctgtccagtaaacttaagcaaattgtgttctgggagccattctagcaacagactgagcctgaggagggtgtcctgggaaccgtcagtcagaagcacaggtggccggtgcgtgggactggcctgcagtgggggttgtgtagtgggacccagcccttatctgtggagtctgcgctgacgtgggcaattagtgtcagaattgaattgaattctggacacctagtttgggtgttggagaattggagaattggttggtgtcagagaaaacaccccagagaatgtaagaaaaaagcaagggaaaaagaaaagcctcttgtttttgtaggtggccagagctaaacccatttctcaaaattcagtgagggggtgactcactaatgggggcccgctcttcaggctccctgaggatggggatgagggtcacctgctcagacccaggggatggggcagtgggacagcctcccagcacccactttctcccagcactgactcccagcccagcctcccagcactgcgagagctgcttcagccctgctgtccaggtttcatgtgaaaacagtgaatcccacccaccccagaacaccagaaaccaggtggaccctgacttccagtggaagaggcctctgctgggaggccactcttctggccaagttagagttctctgcattggaaatgtgttcatacattttgctttttttgttgttgtttttgtttttttggttttttttttgagacagagtctcactctgtcacccagtctggagtgcagtgcataatctcagctcactgcagcctccacatcctgggttcaagcgattctcctgtctcagcctcccgagtatctgggattataggtgtgcaccaccacgcccagctaatttttgtatttttagcagagatgtggtttcacgatgttggccagactggtcttgaactcctgacctctggtgatccacccacctcggcctcccaaagtgctgggatgacaggcatgagcccccgtgcctggcctattttgcattttttaagtgaggaatgtcccataatgaaaacatagataatcactgaagcatcagagtgcccacgtgcagcttatttgccaactttcaagtttccagcattaatattttgtaaagaaaaataaattaatggatattggggagttggaaacttcctgcctgtgactctgatgattcaggatttgacatttcctttagtctctgcagtgtcttcaaggaaaagcatatatctaggcccagctagttctgtggttcccaagagacattgtcattatcaatgtagggatgcgagggttaggagaattaatgatttctatgaaatcagcatgtataaaagtgagggtaactgaatcttgcacttccggattttgggtgatggtgaggacaaagggagctgggaatagaacagaatatcaggttgtggaagtttctctgccattatcatcattttggtcaaatgccttcggtggggtcagcctcgctgctggctggattttcagccctgtctcctgtctgagaggccaagagagcagagcgggcccccgtgaaggccacgcgatggccacgggatgagggacgtggctgctgagccgcctcgtggccacgggccccctgcgtcgtcctgcccttgggaactcagagtgagccctccgcacagagagcagtgggtgagatcacaaagctcaatcagaagctcaggggcacaggcagggagactgcagagctggtgaacttcctccctgacactgcaccagcactgccgtctctgaccagaaaggccgtgacaggggaggtcccatttgcaggttcaggccctggggatgctgcctcgctgccttccctcggggaatcagccagcctctgtgtggggcgggtggaggtgcccatcagggttctcatatctgaagcccttcctgcagcaccttgggggacgtcagtctctggaggactctggagacccactcctgcattgcccacagaggaggacagtccatagcgccttctttccaccacaggaaacagcagcccaccctgtgggagttggggaaggcccttttttcctccacagtaagagaggatgccaggcaggttagtggggtaaataatagaactctctcctgctccagggagggtcagagcttactggtagcatctgagcattgatgaagagggcagggctggaccttacttagggcaaagcatagctcagcctccctggaagttttctttcagcaaagcttgctgtcatcatggccaccacaatgggctctctccattcttgctcttcctggaccccaaaaatggtcatagccaggtgggtccttgcgtttctctccaaatgttcttgatttcagggctgaccttcccactctgcagggacgcaggccagaaaacgcaccactgccctggccttggcccagcacgtagacctggtcagggtccccgctgcacatccaggggttcttcctgggtcctggggcagtgggtccatggggggctgctgggtggaggggggtgactggaccgggtgctgtgcgaaggtgtctcagtggaaaacagaggaacaaatagctcctgaaatgtgcctctgagcctgcccctgtcactatgggacagaagaacacccacaagtgacttggaagaactggcacttggtccatttctcaagagtcatcctgcagaggctcatcggccttggctcccaccgcacccaccaccgccctctgtgctgctgcctgctttgttctttcagaacatgcagcctgtctgaacccatacttcccacgctgtgtcgtgtctgcctgtctttcctcttagaagctaagccccaggagggcagggactccactctatccgcagatgtgtccccagcacctggggcctggtgtggggcagtgctcagtgagcagttaaggcatgaattgtcaactgaagactcccgaggtccctgcgtttggagaggagagctctatttctcacaaagcattgtagctgcagacagccatcccacaggctggggagtgaagcccccattgcaggctgagaacgtccccccattccccgttttcaagaagtcataggaggagcataaatacttgcaaaaggagaaaatgcacaggcacagctgagcttcgtgccccttcgtgggtcacaggttcgaaatctgggggcgacagcgtggtctgagggtgaagttttcagcctctgacgtgaaaaggtgaagcagggggcatgaacgccctgagcacaatcctccaagaatcagctggaaccggtccagggagagtgctcagggtttagagagggatacctgtgaaacaggtgcactgtcaccccaaaactgcaaagagggaggagaggcctgatagggtttggctgtctccccacccaaatttcatcttgaattgtagctcccataattcccacatgttgaggagggacccggtgggaggtaattgaatcatggaggcggtttctcccatgctgttctcatggtagtgagtgaatgtcatgagatctgatggttttggaaggggtttccccttttgcttggctctcattctcttgcctgccgccatgtaagatgtgcctttcaccttctgccacgattgcgaggcctccccagccatgtggaactgtgagtccattaaacctctttttctttataaattacccagtctcgggcaggcctttatcagcagccgtgagaacagactaatacagggccggtgctggcctcggctgggtggctgaaggcaacaaaggcatgggtggcccggttcttgttttccggagccagtttccgctgcctcctcaggaaagcatcctgggtaaatgttcgtgagaaaggggttcactgaggggagtctggcctcccatcccatcctggctgggagcgttgtttttcaggtttctctggggtccccttggctgagatggggtccgttcagctggctgaggggattttatttttatttctctgaatgaatcaacaaaggacaagcaaaagaagcaagtgggcctcatgagactggtttgatggtggcacagagatgcccgggggcaggagcgggcccttccaccttggtgttgctgcctgggaatgggaccccggcctgtgtgctcagcccttggaacccaggatccagtcccccaaatcaatgactggaggtgcatccagcacccggcatggtcctggttatggagcaattcagcggtgctgggcagatggatctcagagttcgctgtatcacgggtactctgagattcagagcatccctgtggaggcccctattgtttcggttaactgagaattcactcgtgtgagcaatgcagatgtgttgctctttattgcctgaggactgaggtttctatggcaagtggtgaattcagagaggggtagagaccaggggccaacggggtgactttccagccttctgttctttctgtggctctgaaattggagccaagaagagcgtgcaggctggcttacaacgctgcacccagggcccgggatgtgcctcccacagatacctcaacaataggagatctgaagttggcagcagagaccccagttcactgccctcttcctttccagagcagcaagtcttggcgtggcccctgcccagtgatagtgaataaagaaacaggcctggcccagctgcagttgcacacctagccctgctatgtgcttggcaggtctcagacattgccaccctgcagatacaggtgatgctttgctattgaggagcagattggggcatgtctgctgggttcggtcaccctgactggacacttgctggatgaaactagccccagccccagccccagctgccattccctcccgcctctcttccacctccgcgtgccccccactccttcacctctgtgcttcctgctatgtgatgtggtctcctggagttagaaggaggataactatcaatcaaatgatttctggaacttgtgggaagccccagtatctattttttaaaacgcaaataattttttttcattccctaaactatacctaaaagcaaaatgatgattagaactctctgagtttggcacagagtgagagcttcagtagatgtgaaccatccactgctggccccgggccacccctcacaccgaagaagagtgagctttgtttccaggacagagcgatgtctgctcaagtctggttcaggctgtgtgaggctctcctggtctccattctcagagagcacagggtccagcattcaatttggggtggtgactatgtcaagccgttgtgatctgtatcctcacgtgagcgctgttggacggggctgagttttccacacaaagaggttgccgatgcccgggtgggagggcactcaggaacctacacaacagggaagaggggctggcactcacttgtcagagtttgcagcaagaggggaagttgccgtagggcctctgatgatggcagcgctggggcctgacggccgagcatcagcgccaggcacatccgagccaagcacagctgcaccagggcctccatgacgcttgttctgcttctgttgggacatcggcagaagggagaactacagctggtaatgggcccagcattcagggggagccaggcagggatcacagctgcttgcaaggcctgtcctccctggcttcctgagtcagctcagagatgaaaggcccagaggggtcaggaaagaaagggtgcactgggtaccacttggaaagatggtttggatggatggatggatggatgggtgggtgggtggatggatggatggatggacagacaggcaggctggtaggcagacagacagacatagatgggtagatagatgatggatgggtgggtagatggttgatggatggatgatagatggtaggtagataggtaggtagatggatggatggatagatggatggatagatagatgatgatgatggatgatagatacatgatagatacctagataatggatggatagatagatggatgatggatggatagataatagatgcttgatggatggatgattgatagatgatggatggatagatagatggatgatggatggatgatagatgatagattcgtacatacatacatacatacatgatagataggcagagatacatggagaaataaagaggtggatagagagacaaatcttgctatagcaggaaaaatagtggtgaaaattgctacttaccaacatgctccataatttattaacaaagatatttaaattattttaattttagttcatttaattgaaaccaacatctttccctttaggctcctgggagagcaatgtttgtttctttgtgtttgtttgtttacttgtttgcagaggctggtctcatatgttgtaatacgaatcaggtagaaaatggacacattctccctggccatgccatcccggttatcaaacaggaatgtcaagcccattttcccagcgcctccaccaccctggtgagtgcccccagactgctgagaggcgcttcttccacgcgggaaggttcagctttcctgggtctctggttcatcccaagtcaggctgtttgctctcgatcatgtctgcaggtttgtggagatttatctgtgtccaaataagcgttggcatctgtttctgttttccaaccacactgttaatatttgttctagtgaaacatatcttaagatggcgccgtcagtatttctttagtcaaaggtgagcattgtgaactgagatttctgtagaaagctgaccatcaggcggagtgtgcatgtaagaaagtctccaatggaccgcggttccggtcagggccggctgctagtgttggctatttgcttctgtactgccctgcttcctagaacgcgctgtcaagatctgtttgacattctgtaactctttctccaacaacagcctgtctcctctgctgacagcgaacatgcctcggatgaaagttcattagtctattgaaacatttcagttaattgcaaagcgagaacccagaattgtcaagttcatatttccatctgtgcatgagcatggtaataaagaattttttggataggttaatttgcctaaaataccatgcagtcaatcagagtaacaaagttgttgctgcctgcctctgtcaggcagggctttcatcaccgtccttctccgggagaacatcgctggctcgtacgaattggcagaaatacagcacacacgagcatcagctgcagagggaaatattattccagagcaaagcacccaacagctgggcattgcactagcaaggctagtttatagttcaaggtcttttttgtaagtaaaagatagccactgagacataagatggctttaatatttaattcagattgttgatactatttacatttgttaattttatattttacttaatttgccacagatgaaaacgctctttggaatgaagtgtgtgtgcttctctctgaagatccctaatatacataggtgtttaatttaaaaataaaaacagatgaagtgcataaactataattattaaaataggctcctgtcaaagctctgtgttcccatccatgtaggaagcatgctctgcaggtcccagcagccggttgttaatctgtgccgatcgcctcacagttgcgtcttgccctatcacggcaggcctcctattaggatcaatactcaagggttggctgctcactgaatgccagggatatcatccagcagcagtacatgccacaaaaggagaagctgggtctcgatgctccacgtctgtaactgcgaaacgcagactgctcctgttggctgcatttaaggtgccaccgcctcctccccacccatgtgtttatggagtaatgtgcttatggaaaggacctaggtggccgctgagttttatgcacgggggccacctccttccctcagaaaggggagaggcccctgctatgtactccctggggcaggtagtttgctgagagttaagaggtgtcagtctgtcaggcataccccgggtgcaagaagtgagacatttcttggatggctggtgtttgagaagctgatgtcaggacatgatggagcttggctgcagcatccgaggaccagacacttgtggcccatgccaaagagtctgacagggagacagagggtcctaaagctgccccagcacagtagcctcctgctgcacatggcccaggcccttgctacggaagactcacctaaaactctgcaaacagaaaacgtcagtgacagggacagcatgccactggagtggggtttcctgacctcagcacttgggattggataactctctgtaggggctgccctgtgcattgtggggtacttacctgcatccgtggtctctgcccagtagatgccagtagcacccaccctgcccagttgtgacagccaagaccatctccaaacgttgccccatcccctggggacagaattgcccccagctgagaatccctgcatttgagttagaggggacctgaatcaggggaggtggctgcggagtttaagagcctcgcagtcatgggtgctcactgagggcccaggaggcctggagccctcactcggaagctgcttgggacagtgggataggcctgttaccaacatggaccacaaccagtcatttaagacagtcagggaaacaaacggggaggtgccttagaggcaaagcttcatttaaaataatgacataagacgtgtgggttggagatggatgcagagaagtggagtttccagatgaggatgtggaggtgggagtagaagggcctgggttcaaatctcgaccctgcctatgccagccgctggctcaccccacctgccacgctgcaccccactcaccacactgcggcgcctgctttttccttgagcatctgggacgtctgtcatcagcagacagctgctggtttccgtggctgccttcctaggggagcatggtgacagcttcctgtctgttacctttccccaccccatcacaaagccccctttaaactcccgtttagaacagtgattgaaggtgctaatttcacattgtcttctttatatagattacaccttccaaagccttcagaaataccattacaatgaaaacaatttcaagagcaaattgaatacctaaaaaagtataattaatcaaaccatatcaagagagcccgcagggtcatcaagagctagacccagcggccgtgttgtctttcctctacatgagcatcattcgtgcaaagtgcatcacagctgattctgagggaggttctgacgtcaccacgcagccctggggaccagccatccccaggagaaggctggttttagtgcatcactgagcgcaaagtatttttgcaatcagaaaataaaaggtacccagaatctgagcaggaaagacacggttcctagagcgaggaacaccccagaatctgagcaggaaggacacggttcctagagcgaggaacaccccagaatctgagcaggaaggacacggttcctagagcgaggaacaccccagaatctgaggaggaaagacacggttcctagagcgaggaacaccccagaatctgagcaggaaagacacggttcctagagcgaggaacagtgcatccaccatcagatgctggtgtgcaaatctggttccaacgttttctcgctccctgtcttttggcaagtatcctgttctctctggagctgcatttcctcatctgtgaagtgaagtgagcacggttcacagctcagaaggctgctagaagggtaaaactccatgacccaagcatccggtcagtgttccccaaagccgtcgtgctaggccatgctcacctggggacctcacctcaggaatcgggaagatactagcagtcgctaagtggcttactgagagaggtctaaataagtcccacaatttactgttctttcccacaagtcatcctgaaagccatagcaatgactgttggacccaaggtatccaatgaccaagtcccagcatcgggcagacatggagtcagggcttgttggtcactgaatccctctctggaatcacagatgcaccccaggagagaggcttagctcacagcaaggaacctggctttctcccttccccagctccccctgatccagacaggagtgaggatgtctgaagggttgtgtccaccaaatggcctccaaggccaggcagccaggagaccaagcctcagtggccaaacctgggatctctggaatcgagatcctcagcttgatgacagggacaaagagaggaaaagacaaagtcaacttcgagggcaaaaagacttcagaagaactggaccaggggcccagggaaagcagtggtgaattctctgttgaggagaaaacagagccaggtttacaaagagctgcagggcatgtttgcagaaggaagaagagtcggggcattctgagctctagggagccgacgctggcatgggggatagtacagacccgctcggagagcccctcaccgcctgccaggcgccccttgatcccagaaacaccatctgcagaacctgcagcataggaggccaggaaacagatagagcagttgactggggccacagaataactggcaggtgagctgaacccagttaattataatcgcagacacattgtaaggcccagaacccaagttgagcaagaggggcttttgtttccgagtcatggggctagggagattcctgggcctctcgtgttgccctttgaggctgaagtgtctaataggacgtgtaagaatccccacaaaactcaccagggcgggacgagagggaagcacctctcccgagctgtgcatggactatctgtgaggtctccagaggcacccggacccaggcgtgatcctagtctgctcactcgaccgcagggagggagaggcattttgaccaagtttgtttctctgtggatttaattagtatattcattcaacattcaaatatttaaggagtttttttttctttctccatgacatcagaaatctctgacatttgctgaaccagcttggcatctttattatggatttggatgtgaggcgtccacagttttgagcagtctgcgtgatagtttgttccaaagagcgcatgtgggagtcggaagcatgacaaacacagggctatattagggtcaggaataacgatcatctgcttatcatgagaacaaatatcagcagatcaatgaaaacaaatctcaaagcagcgaaaacaacatgattttcaagaggaaaaaacagggtttttaaattttgtttttcaggattgcttttagacttggttgtatgagcagacaccgttcagatgcttgcagcctccacacttcacaaaattaatgtcgtaacagacccaagagttaccatcatgggttcatcttctgagccccgtgttcaccttcagcacagggcagttataccacatcatctgtacttaccagataaggatgccaaggctcaaggagactgtgacctaccagggtctatagctgagctatcacttggcccgagttttccattcgcacatcatgtaaccttgacttctcgtcccacctcgtagggttgctgtgaggatccaacaggacctgaccagctaggaagtgctgcacccacgttagcgcccctgctgagtgctgggctggcatgggccattcactgcacagcaaggcacacttagcccctgcaatatttgagcacttaccgtgtgtctggccgagtcctgggttcaggggttgtagcagggaacagaagagaccgagaccctgcccttgggaaggggacattctagaggtggcagtgggagagttgttaaccagaattgaactgtcgactgggtcagggaacggcggagcaggccaaggggtgggggtcagttttaaatgggacgtcagagcagagggaatcagctggaggcgacctctgcaccctccaaagacgacctggagctgcagaggccagtttcactggtctcattgcactgtcacctgcgttttctgtctggccttgatgtgggggcattactttgggctcatgagccaagaatgtgtgtgtgtgtgcacgtgacttgcagaagcagaaggagaagcacccgtgttcccgaagtcagtgcgttgtggggggtgggggtggcacagaaggggttggagaggatggacgggttcactgcctaacagggacagggcagaagctcctctgtgagctggctggcgcccggccttgccagtccattctgctgggtcaggcctttttccacgcccgggcttagctaacgtgggcagcaggtctgcttctgcacccagcagcaggtggtcctggagccggagacagcttggttgctcgtgttgagtgaacaggaaggaatgtgtaacttgtcacctccacctatagattttagaatgataggaaggcagccattgtaactcagagcctcctgaattttttaaattgcgctcgaagggtcagaagcactgaattcaggccagagaatgagcaactctagaaaacatgtttgttttctgcccttgcctcctggttctttgagagccactgaaaatcagggcttcagaatcctcttccgaatcctgtaggagggcggaccctaccctggctcacacggtggcaagaggagcctcagctccaatcactgaaccagacaagctttaggggaaaagagtcagaagaagcgtgttttggaggagggtgggtgggtgctgagaaaggcctatcagctcagcggcttctgggggcagcaggagaggggcacacgcatgataaattctgtctagacacaggttggaggacccgttccaggggtgtgtcctctggggatcaggccagtggttcaaggtgagcaaaccagggaaccgtctgctggaaacctgactgtgccagagttccacccagaacttcccagggtgttggtggcacttaggtgccagcctgcctgccggcttcaggcccgtgggacagcagggaacactcaggtctcccccttggcacagtgaatgctcaagacgttctccgctcattggctggggtggggacctctgtgctctgtggggtgttccgcagcctccccacctccacccctggggatgccaggagcaccctgcccctaatgtgacaatcaaaaaggtcaccagacatcgccaagtgtcccctgcggagcagatgtgcccgcatggagagctctttgtgtcgaccatgactgctttttgtttttataaatggggaagcggacgggcagagagggcaccccaggaaggtcctttgtgtgcctggtagagctgaggccccctggttgggacagcagtgcctcccgccccccgactcgacttgaggcccaggcacttggtgtcatgcaggggtgtccagacggcctggtgcaggatccctttgatgtggaggagggtgggtccctgcccgctagggtggggcagggtggttctgtgagaggcggccacttctagcccttcgtcctttctcccttttgtgtcggtgtcccccagcgaggcccaggacttgttctcacccctcccttccctgcaggccagccgcctcctgggccccctggccttccccatggcctttcaggggtctgcgccctacctcctcacacagcacaaagccaacgtgccccaccaggaattcccacctcacccctgtggcccagccattctcccgtgtggggacgcgtggacacaaccctgaggaggctgggtttcttctggcatcgccgcagacatcctcctgctgacccaagccccgaagcccgcagcttcctgagctatttgtgtctcattcacatgtgcggtttccccttcccaggacccccggctgctgcgtcggcctgaaaacacacacaggtgctgaggtctcgtagagatggtgccgcctgccgtgccacggttttcctcactgccgcccccacccctctgcacatggaaccgggcacccccacccctgtgctcagccggtcactgctctgtcaaagcgacttcagggatcacctgcctgcagctggcttccccactgcactttgggtttgccagctcattcattcattcattcattcattcctctgcttgcccttctaagcctggctttacaaactcgtattttctccacattcattaaaggcagagagcatgaggccgagctcctgccctgccaggaggtcaggtgcccttcctgctacaggagaacgccgtccaccaggcagcagggcctccagccccacaggccgggcatctggagtttctccaggtcctgtgggggatggcccgggtgcaccccgcccagcgggtctgttgaatgcagctgccaggctagactcacgcccactgacttgggatgtcacacagagacttgcagccaagaagacagagcctgctccccagccctgcctctgcatcccaggtcgtctctggacaccagccacatcatgggcacagacaagtgtgtggggacatgaggaatggatgatgggcccctctccttcctggcttgcacattcctttagggtaggatggtgtctcactttcatatctcatcaccatccctggccgtgcgctgcatacagtggaggcttgataaatgcttaatgagcgtgtgccggcaagtgcctctcagccaaggcatctcgcaagcttcccaggctctctctgcgggagccgcctctgatctgcacaggcaggcaggagcttggccacgcaggttcagctgcagtccccagagcagctgccactttgcatagctgcgccgtggagagcagagaggggctgggaggaggcacgtgcttgtcttgtgaagcaggtcagaaatggccactggaaggccaggcggtgcaggccagggagccccctgtggctctgtgcacccagcccagccccccagccggagccctccaggaagcctctggccaaaagctttgactccagccagagtccctgggagcagccggcagggagagctggagacagatgttttgagagctcactgatgccagaaatgaaataaaaaaaaaaataattaagagcttggactccaaaggtctagggattaaaattccccaaggcaaaaatgagctgtaatcaaaggaatggtgggctgttatctgtcctccacacttgtcgccctggcacgtgtggttggctttaattattgatatttctttttaagttaaagatgaatttgagacagctgcgaacttggacagttgatcttccagtgacagggaaacctgttagtaatgatcacttaaggcggccgcggtttttccagccttaacagaggtggccagagccatggagaagaatctaggagccccagacaagctaggctgccctgtccctgccaaaaactgtcccacgcggctccctgcccccatgggaaggtgctcggtgcccagcgtgtccaggttccgtcctccctgcagcctggagcctgagtccgatgcggcgccttccttagatggtcttcaggcctctgcaaatggaaccagctgaacaggaggcagagggtgagagtcagggagtcccctgtgactcagcgcaaggagtcagggagacatgacctgtggctcggaggacagctgactgccttgtcccagctttccacctctgcccgggctccgaggcggtgtgaggcctctcacattgctccctgacacccagggagcctggcagaggcagcatcagccccagaaggtgccgccgcttacagccatgaacacaggatgcagagcagtgctcggaggcaaatccaccccagtccctcttggacctcagccaccatccccagccagcccagtcaggcgtctgccagctgccagttatgccttggtgtgtgtgcagcgcatgttgcatcctcctaacacttctgtactgtgacctcatggctgtacctgatacacctgggagtaggacttgggcttgaagagtctgcctgggcgcccgctcacaccagccactggggccccaggatgctcttgaccacggtcagcagggaagggcgaagtgtcagagatccccaggactctgcttggctcagggcttgtggtttagctcaacatgggacgctcagcggggcaggtcaggcagggccttggtttggggctcacacctgctgggaagggcacggccacacctgcaggcccctggctgtgggatccaggctccccgttttgcactgctcttgcatggggcttcagcgccttcctcctcctcttggggaagaagtcacatttggttggaagttagcttatattgtgatttaaaattctcccagagtccaagacactccaggatcccaaagttagtgttggcaagaaccaacttatggattataattcttggtcatgttcagatcctccctgatacccatttgaaactgaaatgactctctgggtagaaataggtagaaaacagggttcagttattcattcaccaaacccgtccagagcccttcagttgctggggctggggtagagcatgaacggggcccttgctacatttctgtgcccgtgggaaggtagacgggtgaaacccacagttactgacaagggagacacaaggtaagaaggaagtgagcagggataggaggtgggcgtgccccaggaaatcctggagggcctctctgaggaggtgacattgactgaggaatgagacaggatctaacgtgtgaggacagaggagaagtccagaggttcccagtggtctgcagttctgcctgctaagcaccgctgtgtccaaggtgttcgagctgggactggggatgcacaggggaagcataagacagcgtggctcccctggaggcccctgactctcccaccgtgatggctgctaggcgtttccgtctgtgtccactgtgcatgtcaccatagtgctggggacgcagagctgtcccgtttggaagaaaactatggactggagccagggcttcaagttcggtggggcttggttgctttgtttaaaagtggggccatggctgggtgcagtggctcacatctgtaatcccactttgggagaccgaggagggcagatcatctgaggtcagggattcgaaaccagcctggccaacatggcgaaaacccctctctactaaaaatacaaaaattagctaggctgggtgtagtggcatgtgcctataatcccagctactcaggaggctgaagcaggagaatcgcttaacctcgggggcagaggttgcagtgagccgagatcacgccactgctctctagcatgggcaacaaagcaaaactccatctctaaaaaagaaaaaaaagagtggggctcaggaatctgcattctcaggtgcacctctgagattctgactcagactccatgaaccacccctgaggagcaccctcttggctggcttctgccattgtctgccacagcagcttttgttctactgggaagtggctgaaggtgtggacagcagtgggggtggcacgcgtcctccggccggtagtaagtgaatggggccctcaggaggcgtgtcctcccttgcaactgcagaccacaagacggcgcctccccacccagccgctgccataaggagccaggtgtgggtggagccacgcaggttatttccatctgacagtggggcaccatccagtgcatcgtgaaggctgcgcaagtggctgtcgggatgatgccaggctctgctgacacgtcagatcatccgggatgcgctggcacacacgtgtagcctcctgtgatgtgcacagcacaccggggcaggctctgagtttgcttgcttgagtttggagtctccaccagtgcaaccttcagaagaaatgctcctggggcggagagtgaagcgcagggcacatgcattcagtgcaggctgtgaaggagcatgttgggatggggcttgtttgcttgaaaacagaaattcagttggaggccttgccctgcctatctggagtgtggctcctgagctgtgcacttatacaatacccactatatcacccccaacaatcgaccctgtgcttttcagcaaaacagtgtcaccgatccttccaactcaccacccacaggtgccaggataagtgtgacccttgccccattaaaggatggaagcatcgttaacgccgggcctccgggaaatgactttcacacagggaacctcaaggctgctggaggcataccagcccggcttccccctcccgggctgggtggtctctcctttgtagaggcagcccccactctaccctccacccactccacccactcgtctgctcacatccatccatttccccacctctctttccatctccccacacacccacccttcctcccctctcacttcccccatgtacctgacaagccaccaaccagccactcactcattcatacttttacccttcacccatccatccctctactcacccactgacccgtctgcctatctgtactcccctgtgcaccacccgcttcctcttcctctcctcctctccccaccctcccaccctcccacccactcacttctccatccactcacccatccacctgtccatccatcaacttacctattggctttacgttgtctctctatccatcttcttatcctcccatacaaccatatacccacccatccatcttcccatccatctacccatccattcctccatctacccttccattcctccatccatttatccatccatccatctcttcattcacccatccatctatccatctatctgttcatctatccatccatccatccgtccattcacccacccattcatgcatcctcccatccatccacccattcatccacccatccatccacccatccatcctccatccattcatccatccttccatctcttcattcattcattcatccatccatctatccatctatttattcatctgtccatctacccatccactcatgcatcctcccatccatccactcatgcatccaactctccattcatctatccatctcttcattcattcatccatccatctatccatgtatctattcatctattcatccatccatccacccacccactcatgcatccaaacatccatcctcccatccattcatccatctatccatcagtttattcacccattcatcctatccatccacccatgcatctgtctatccttccacctatctgtccatctatccatcaatgtatccacccattcatcccatccacccatcaccaagttccaaaacatgtaagacagcctagatcttcccggagaccatctatcatggtggtaaaaagcatggtttctggcagcaagggtgagttgtacaaccttcctgcaccccagtttcttcatctgggaaaggaagtgacaggagcacctgcctcttggggttttggggagaactgacgagaccgtcaatgtgatgcccctgcacagagctcagtccagggctggtgctcagtgatgtagcctgcagttaatgtgcactgagtgccatctcccccccagctgtccatactgtgctctttaaacacagagacatctaattgctctcagaaacacgagggctttctgttgtttaatagcaggagactctgatggaaaatcccagttcagattttaaaacaccaccaccaatcccaaatgagttttcaaggcgggttctgcttctctctgcaagtgaaacctacggcaagtcagtgtttcagacccagctaaagcccggtttttccatctctaacagggaggtgctattatttacctgatccaactcagtgggttgtttaggattaaacgagtgacacatttcatgaaagggctctgcaaaccgtaaagctctgtaagcagctcagggcatgggccacccccagccacacggacagggagagcctcttcaccctgtatacccctccttcctgtgtgtggacagaaatgggctcatttacgcactgaacacacacgcagcaccttccgagcccccagaaggaatggtgaaacaaagggaggatgagacagtcccgtggagctcggggtaggtgcctaacaccacgacagctcaggcagagagcagtcaccccacacagcaccccacaccggtgaccctgacttccgcgagtgttctccacacccatagatctgcagctttaaagcaacaatcccagaggctgcggggcaggacccccacctggatcattgggggctggagcagactttgcaggaagcatctgtggcctcctgtgcccatcgcagcaatgtgtgtgtggcacccagcactcctgggccgccccagcccgttgctgggagcttttttcccactgtggtaaactacacttaacataagcgttcgttttaacactttgaagcgcagagctctgcggcgttagtgtattcacatagctgtgcggacatcacctcctccagaattctttttcctaaaataaaattctgtccccattaaacacaaacttcccacttcccctcctgccaggccctggcaaccgctgttccactgtccgtctctgtgattttgactgcactatgctcacataaatggaaccttataataattgccctcttgtgaccggcttatttcacttagcatgataatgttccgaagcgtgtgtcggaattgccttcctttgtaagtctgagtggttgccattctatgtagaggcggcactttgctttcgtgcccgtctgcccgtggacactgggttggttgcagccacattttggtgatgtgaacggtgctgctgtgagcgtggggtgcagacctctcttcgggtcctgcttcctgttccttacgatgtctgctgagaagttgaattgctggacccggcagtaactctaggtttaattgtgtaaggaactccaagctgttttccacaggggcctcacggttccacatccccaccagcgatgcacaaggcgtcccctttctcccaatccttgccaacacttgtgaatgtctgtttttttataatagccatcctaaggattgtgaaatggtgctggggctttttgcaaatataaccaacccagtcaccgcccctgggagaatggtgacttggctgctgcgggtgatgtgccctcacccatcctgtgcccaagaggggctggcagagggagggccttttgcctgcgttttgaaggcagaccttcagggtctcagctggctcttctgtgtcccctccatgttctgtttgactgcaggcatccccatggtcccctgagaaggacagggcacaagggaacgaggggcgggcaggggcccaggggccgggcaacagaggctgggctatcaccaccagagagggcatcccagggaagctgcttgggaattctgggggttggagtaggaggaggaggattctctgggggctgaccagttttgcacacacttgccacccacttctgcctgagcgctagggctgcaagcacgtcttcctggtccgcgcctgcccccaggatttccccactgtgctcccagagcctgcccgcccatagttggtcctgctagactccagagcagggggcaggacacaggcctcgaagctttggaaaatgacttagtggcagtgggggcttcccgcagtcttccagggaggggcagagagcattttcctgagccccagaaagtgtggccgtgacagcagcaggcctgagtcctctccagtacaaggcaggcaggacgccagcggctgggcctgctgatgaatgcggggggctccacacgcgtgggggtccaccgtgggtcattcttccgagttttttcctcatctcacttccaatacagaaagcttgccccgcccttcctttggcaactgggctaatggccgttgctgaaatttttaggcagtttaccttctgcggattcacttctctttaaacttcagaccatgaatcgcataagaaaaagcactcccagagcctctcaatggaatgtggcaacagcagagccagtgtgaaaaggcagaaagtggctcctatttaatctgggagagtttggctccaatcattaaaaatgaaagagagaaaagaagtttctttttaagagagagacctgctagggctcttgttccattaataagccaagtgatttttaaatgaggatctttgcttgaataattcgttttatcatttaccaactaaaatggaacatcaatccctgttcccgtcgcagggctgtccccggcagccttgctgccttttacttgtctctgagcccagcgagcgtggccttttgtctatctttgcgaggctctggcctctcttccacggggctttcagcccagctgtggcctaggatggaaggcaggagacaaggctgcccgtcccacctgctcttctcccagcgcctggaggctccagagttccacgccctcccctggtgccccagactcctgagtcgctccgtcactgtgaagcaccaggtgcctgaaccccagagggaagcccaggaagcctccacaggggcggtagaatgccaggctttgcaggaagattctaccaccaggctgcatggagggcagctagctgggggcccaccctccctgagctgcaccagggccgggccactcacctcccctgatggtcccctgcaaagactgcagcagcctctgccagttctgatccacccctcggcgtgcagagatcacctggactccagtccagcaaaggttcctgggtccattcgggggcaggcaggggagcctcagtttggggtttttgtttgttttgccttctttgctttttgcttttgtttgtttttcttcaagttctgctttttaactttttattttgaaatatgtaatcatgattcatggagagttgtaaggatagcacaggggtcccaagcaccctctcccaggaaaggggcacgaggaagctagtgaggggatgcgcgtgtgtgtctgactctgccgtttatcacacgggtgtatctgtttaaccgttcttaggctgcatagccgctcccacgaccagagagacctcccctacccgcagccctgaggctgaatctgggtgctcagtgcccaccctggatctcctctgagggtatctgtgaagctgaacatcccagtgtgaacgttggaggcgcccttaagaactgccttggttacctgcttttacctgaagctgcagctctttctcacccctgtgtctcagctcttggcagtaactccaagaagctgtcctgtcactgccctatgtcagcttttctgtgaatttcaccttcctttttttctcttttattttttatttttacttctacgtactttcttcatgtcatgctcccattctcccttaacaagcatctaaaccatataaaatattagctttgttctcttctagcataaagcatctgtgacatggtaagaaaaatgacatgaaaatatggccgggtgtggtggctcatgcctgtaatcccagcactttgggaggcggaggcgggcggatcacctgaggtcaggagttcgagaccagcttggccaacatggtgaaaccccatctctactaaaaatccaaaaattagccggacatggtggtgggtgcctgaaagcccagctatttgggaggctgaggcaggagaatcgctggaaggagcccagaaccaggaggcggaggctgcagtgagccgagatcgtgccactgcactccagcctgggcaacaagaataaaactccgtctaaaaaaaaaatgaagagaggagaggagaagagtcggggagtgagatcacagacatgaggctaattaggaagttgaaagacagccaaaaatctgaaaaagaacagcatccaccatagacgagtggaagggggcacacattgttgagggaaggccccacatataaggtgctgatctatggatcggctgcccccttcacactttcttcctgatctcatggcagccctgagtaaacacttacctcgatgagtatttcctgctcaccacattgctgaatgaatgaatcctaaaggagaaatgagatttgtgtggtggctttctagggagagtgtgtcctggcaaacgggaaccccttgtgttctgtagaatatcctaatggatttgaatatggcaagggtgttaaaagcataggagaactgctgagatatgaacagaagagcaggaagtgttttgaactctctggggggacactttggaaggaagtataatggatggaggagagctgggagggcagccgggtgacatggagaccaacaatgggaagggccctggtagttcccagggtattggctgaagaacctggtgaaatataaagatacctgtcattcaatttgaggcacaatgtgcacgtaaacctttcctttcttcctctctgcccacattgtgagttaaatcctttgaaaatgggttggtttctggttttacttcgacatctgggtagatgcaatgcaaaacagaggtgctctatgggagatggatggatgacggatgggttatgggacagaagcaaaggtgaccctgaaaactgaagcaccctgaaaattccccaagatctcagtgagacttcagattccgcacagtgtagggtagggaattgaagccaactcaggttccagggacccacggaggccaatagtcactcatggcgttgtgataacggaatgaatgacgccatgtggagggcagccaaggctgcctagtcatgttcatcaaatgtcagtccctgttattactgccggtagaatgaatgaacacgtgcataagtgaatgacaagagaaagaaaggggcagcaccagcctgtgtgcgggataaacgacgtcccacagtatctggcgacggttctgaggtccgtgcaaggtggtgaattgaaaatgtagcacagcagggatgtatcatgtagggcctgcccctatttcagtggtggtaatctgtgcaattatagtctgtgctgttacatacccaccattcatacagggctttccagggcattctctgcattggtcctcctttggaggcggggggcaagcatcagactggcagacactgactccctctgccagcagggcggctcagcatggcaagtgccattgaaataattgatttcttgctttgattgtgtaagatggctgctctgtcatttccttggtatgctggctaatgttcaatgcttacagttcctaacctgaaataaaatcatttacgatattaatttctccacataacctctttaaggacttgatgaaagccttgcctaagaggtcatcttgatgagacccggagtgcaacattattgtggggcagaagggatacatcgcgtcagtgcttgcctgcacacgggccctgactctgcatggttttaaagagaaagaggctgtttccctaacctgggtctcctctggctatttatattcttaacgcagcgcagaaggctcgagctttgtggggactcttggatctgtgaacagcgtctttatttcttggtgggctttaggtcagctggccgattattttatgtcctttttatagtgagaataccattgtgaacagaaaattatctggctatctcacaatgaaaatgcccatctttgtcatcttggagccgctgtgtcagatgctgaacccaaacccagctcggcttcgtcataattgccttctgttcagttttgaagtaattactgtcttataggagttctgttgttttatcttagtggatagttcacttgggagagctgatgggaaaaagaaagccatagatttggcttccccatgaagctccacagcttctgatggttagtggtatattttgatataaaatcccagagaaaatagcaagatctctctaactggaggaaggcgtgcgctcaaagtcgttgactcttcttggtctttgtgacattatcagcagggaaacccaggccagccttgcggcctggtgagactggaagccagctcagagagcacgcacagcagcaacgtcacgtgcctcggcggcctggctcacggccgatgcagtagcccacaccatccagggtgcatgagggccccagctgcagagatgaatgtgcacgtgcatacatgcgaatctgactcagaagacaagcatgcaagtagacacattttccgagtgtagaccaaccacccagccctgtgctggcttccggggcctatgagggggctgctgctgttcagggggattggaggagggtttagagaaggggaggagctattgtcatgtgagtggaatactgccaccatgatgagacaggtaaaaataaatctgtaggttggagtccgggtcacacccctcgaggaggagaggagggatgcttcgagacggactggagatgcatctttaagagttggcaggaatttgctggcagagaatttatagagcagccttgaatccatacatgattttcctactgatggaaaattctgctttcatcacccagcaaactcagcggagattaattaaacatgagacactgattaatgtttgaagggtagcgggagtgtgggctacgctgttggtctgtctttgggtgattcttggttccgtttctgctaataactccttaatactgcgagttccagctctgagatgggggaagcgagtggtgccgggcaaggcagctgggcctgctgtgggaacgcccagcctgcattctggagggtggtagctggtggctacgtttgctgcacgtggctgggcaggtgggtgccagaggcccaggtgggtccctgggacgtgcacctccatgttttccccagccctgtgctgccctctcagctgcaggcgctgggcagggtggggcacaggaaggcggcaggatggaaggggaccccggagagggagaaggcagcctggcacagggtctggggagaggaaagcctcgatgtagctatgtgccagtgatttgggggagttttcagccctttccccatttcatgattgatgtctgctcagaggcttctagaaggttggcccttttcatccgctcagcacagaggatccaagggagctcagcagggtgggccacccctccagctccccacagcccacccctccagctccccacagcccaccggccccttctctcagttgttcccacaaaccaggccttctcctcccaaccccctgctaccccagagccctcaaggaatcatcagactttgccacctcagttcattctggctcagaatacatccctcacctcagcacccttggtttagcagatgtttccagctgcctagtgggtgtccagaaagccctgatcccaccacacctacagctttgggatcagatggggctgcctgacccaccaggcaccacagcacccaggacacctacagctttgggatcagatggggctgcctgacccaccaggcaccacagcacccaggacacctacagctttgggatcagacggggctgcctgacccaccaggctccacagcacccaggacacctacagctttgggatcagacggggctgcctgacccaccaggcaccaccaggcaccacagcacccaggacacctacagctttgggatcagatggggctgcctgacccaccaggcaccacagcacccaggacacctacagctttgggatcagacggggctgcctgacccaccaggctccacagcacccaggacacctacagctttgggatcagacggggctgcctgacccaccaggcaccaccaggcaccacagcacccaggacacctacagctttgggatcagatggggctgcctgacccaccaggcaccacagcacccaggaccacgtgatatttagcagcctctgaaatgttttcttttaaaatcagaaagaaaaaatgagtatggtctagcccaggttgtagtcatctttttaccaatacggtcatgaatgaaatataattcttaattttattgttctagaggaaggggccaccaaggcaaaagtgcctgaggcccacggaagtcctagggcaccctggggtttggaatggggaaccagcaggtggatggcagaggggtgtggaatggggaaccagcaggtgggtggcagagaggtctacactacagaaggaagtgcttaccaggctgggcagcaggtgtgggcaggacagaaggcttaagggggagggttgttgaaggtgatcaaagatgagaacagagaggtggccagagccaggttgtatctgcaggcgagaacttggggttttacttggagcacaacaggatctggtgggcagtttgaagcacaggcagacacgaaccgcatgatccttaagaatcccccaatgaaggcagaaataaaagtcctcttgcttttgtttcctattgtgctgtaacaaattaccataagctgattgccacacagtcctgtaggtcagaagtcttacagggctataatccaggtgtctgcagggctggttccttattgaggctccaggggagaaaccacttccttacctttccatttctggaggctgcctgcattcctcagctcgtagctccttcccccatctctgaagccagaaaatgtatcatttagacctctgcttccatcctcgcatctcctactctgattttcctgcctccttctttcccttttaaggatccttgtgattacttttaggactgacttggatgatacaagatgatcccctcatctcaagatccttaactcagtcacatgtgcaaagtcctagttgctatgtgtcttagtccattttcagttgctacaactgaatagctgagactgggaaatttataaagaaaatgaatgtctttcttttagttctggaggctgtgaagtccaagaccaggcagatgcatctggccggcttcaggtcagggccatgcactgtgtcataacatgagagaaagcatcacagggagggggggtgtagagagagccagactggcttttataacaggcccactttcgtggtaacgaccccacccctgtgataacctattagtctgttaatccacgaatggctctgccctcatgactcagctacctcttaaaggccccacctctcagtaccgttacattgggaactgagtttcaatatgagtcccagaggggacaaacattgaaaccatagcaccgtgtaaggtcacaaattcacaggttctggggattagggcaaggccactagggggaccattattctgcccaccacacctctggagagagggaaacgtgtgcactaatgccctgagtgtgtcaggggaccaagaggtgcatgtcccatctctccttcacccgtgtgtcccatgtgtgttgaagaacacagcatttagtgtaatcggaccaggcttcctcttgagacctcaggactccaccagctcagaaactgttttctgtggctgtcattggccacggtggctcttctttgatcagcaatgctgtacacagccagctgctgctacaccagatcctcacggttttctgttccatgttctttaactttggacccgccctttccttaatccatctgagttcccctcgtcatatgtgctttggcactggggcatccccagtaggcggagcccctgctacatgagtccagaaaaaaataaatgattccaacactagttaaagaaggcaaggaagactttctgggagaattttgctagaagggagtggtagaattcaactctgaatacagcaaagacagctgagggttgacagccagtgagcagagtgaggggtcaggggatggaaaattacagacaggaacaggattggatagcaagggtggggattcttgctaaaggcaggccaagcagttagataccaagggtggggaatgaggaacttgatccaatatcaggagtgtggaggagagtttcagtgaatgagctgagctttgccaaaaccaggcttggcaggccaaggtcaaggctccgtccagaagagggcccagaggagactgagtgaagttctttcaaaaagggaggccacgtcacaggcgcgttttaatcatcggagcactcctgagggtggaacagggtcagcacctcctcacagatgcacagggctgcgcagagcccttcgaggacggggagcagaggctcaaagccaaggccagtgaacccgcctggtgccttcgacagctctaccatcctgccttggcctccccctgcacccctcaagtcctggtcccagatacttgcaataaaggagccacagagcccccgctttgaatgacgtgagcgggctttccaggaaggggaactgccaggatgagatgattaccagccagaggagaagcacaaggtcacggagcgggctcaggaggggcggtctccccaggccccacccgctgcctccacaaccagggcaaagccagggccagaggggcttcttcaacaacatcaacaatccgtctatgtggtggggctctgccctaccgttcctggcttcgtggagttctgaaatactttgtgcataggaaggggcagcccaccgtcagccaggaacagcagtccacaagctgatgtggaaaccctcctccccggcctgtccagcctgcagaaaacacatgctgtgagctggatccaaaacagagaagcatttagggaggagtcgctgagtcgtgcggcctgaggaagggaccccgtcagccgactccagaccagcctctcagcttgggctgtgggcgccggctctctgtgtgctcacatggcgggcgagctcccgggagtctcttcttacaaggtcactcatcacaaaggccccactctattgcctcagttaaccttcaatacttccttggaggccccatctccaaattcaagcacactcaagttagttactaggttttcagatgcattctttccctgtgttgccaacagtttccattgttgtgtgcttgtaactcttgatcccatctgccttttggaacagtggataagagacagccaagtctagaattccagctttgccctgcatggctgtgctatgttacctagggcctgttacttaacctctctgagcagcaagttcatagttaaaaagtgattgccggccaggtgcagctgctcacacctataatcccagccctttgggaggctgaggtgggaggatcacttgagcccaggagtttgaaaccagctgaggcaacacagtaagacttcatctctacaaaaattttttttaaaagttaaccaggtatggtggcaacacacctgtggtcccagctactcaggaggctgaggcaggaggatagcttgaacccaaagtcaaggatgcagtgagctatggtcacaccactgtactgcagcctgggtgacagagtacgaccctgtctcaaaaaaaaaaaaaaaattaactgctaacatttcctggtgcttctgcagtgcagggaaccatgcggagagctgcacacccactctatttcaccccccttcaaccacccagaaccacagggtgctgtggttatcacctgcacacactaagggggaaactgagtcacagagtggtgaggtagtttgcccaagatcacacagcctgctgtgtgatggagccatgactcaaacccaggtcttctgaccccagagttagtcctgccccctcttataaggtggagggaaagatagcgccttcctcctgagggtggtggataagagggcagacagccagtctggattccagctctgcagtgcacatgtctgagactcacaggcaatattgtgtgtacagggcctggcccagccccagcatgcagtgagctcaggagaaatattctaacagtctgtgtggtcactcacagcccaggtcatggtttccaccaggcttggaatcatacccctttcagctcagaggaccgagcatgcagtgtgattcccgcggtgggaagtcagctcattaaagaacccggcacctagatcaggggcctcttcacgctgcctggatgtccgttcaggaactcggctgaaatttaaacctcctgacactctggtccccaggccttcacacactgggccatcttccgtgagtgtttattcagcccgcacctgctcagcatccctgttcagagctctggtcaggcatgttcctgccacctgacagccacccttctgaagggacacacacagaggaccagggcacagtgatcaccggctgtgggcatgggtgtcagacacacctgggctcaccctggctctgccatcttctacctgtgtgaccctgggccagccgttcaccccctctgggcctcagctcattgtcaagtagagagaacggggttgctgtgggggatccctggggggacgaaggtaaagaggggccgtgccctggggctctgagcagcttctgctctcactcctgcaggcaggtgagggctacagacacagatcaggcctcggcgccccggctgctcgcctgcctccctgagtcccagacacatcagcctccagttcattaaggccaagagcactaaaaattctgcagaaacacttcaaggaagggctatgaattaaataaccacaggaaagcttttgctaaggagttaaggctaaatccagccttaaacatttgattagaacattttctgattccagtgtactggaatactgaacttccacgttggctcaaaactgcaagtgtggttaaaacacactgtctgtgattcgggaagactgggaaagtgaaggctccagggagtgggctctcgagcgtttgcctagtgagttcacttcagccattcttgttgttcttgacaattatgcaaaattgagcacaggatgcttggagggagagagggtgacacccacccagcctgtcctctccatccacacgaatgtttagggaaggagatgcctcatccagccagtatagcgccaggcacgtgttcccaagcaggttcccttgggttcccagcagctcagccttgggtaggatcagggtctcatgccccaggtgattggatccagagccaccaaagtccccttgcagacacccttccttgcgggtggtacctggctgtctgcctggaggcatctccctcacgctttgccctagcgcaacttgtcctagcagaagtccaaaaacatgattcacatagaattgtaaaaagccaaaggggtgatttgcagaagtaaaatgaaattgtcaaatgccagaaacacatgcttttatgtctttgtatctcaaagtgatagtcaaagcatctaataggaaaaacacatcagtatgcacacacatattctctctccctctccctctccctctccctctccctctccctctccctccctccccctctcctctctctcctcacaaggtgtcaaggggctttaggtacatgggtggggaagatcttccccaccaggctgatccccatctgggaggctactgctggttttccaaatgtggagaagagccaggctggtgttctgtgtctgtggggtgcttgctctgtaggtaccacggggagttgatcacaggccctgacccatctattgcctctgaatgggtgtttgcttaggacagtacagcaatgtgtcagactcagagggagaacagcccccaggggacagttaaacagcagccattatcagaagcacaaaccgagactggcagtctcaggccacactggtcatgagcacacccctgcaggggctgcggcctgccgagtgagtgggggatggacacaggttggccggcaggaaccctgactgctgggtgccaggacagaagaggagacgcttcccaattaggggcacgactcactgcaggcaggcgtgggctccagccacctctgacttcccttgcctgccattgccctcagaggagcgcaggtgcagaaggcaccggccacaccacaccatcgattgagtattgcagggaacagaaaaggaagatgaagacttgttcaagatgctaattcattgtctgggtctttctgatggaatgtgggaataggaggcagtgagaaggtcagggctttcagtagggaggaagaagggtcagcccgggttggagaggcacccgcagctggtgattatcagagcctgcttgtgcttgcattatgtataaggactcactcctctgtgcagacaggatttctcacttaacctctgagggccggcagtgtgatgtggagaaggcacacagacctcaggtccaaccgagctggaggcacacccgggtccgcagctcctcacagggccagctctgccgagccccactttgtcgtctagacagtatggggtggggatttggaagtgaatgctatgatgagcttgctctcgcccatccttttcccatttcccatgttggagagtctctcatcattcctttaccatcagaaccactgcagggggtgaatggcgagaagagctgctggctgcagggcataaaggtagctttttgaggcgcgctcccagggttcatgttgagccaagtcaaaccaccactctgggtcccagtatttgcatgtgttacggggatagcaatggccacacctctcccagcttgataacgaaaaccaagtgtgttaacatgtaaagtgcttagaacagtgtctggcactgcgattgctgactacaggtttgcaggaatcctacttttatgggaaggagtttgtcctggagtctgtcctgcaggtggccccacctcgcaggtggccatcgggggccatctggtcagccctgctgcaggggacttgcaccaacctcctctcctccaaatttaagattctcaattatgttttatctatattcgtttattttctagtgatttcatggttttagctctgccttcagcatgagctgataacagtgatggtcacatatctgactaattccagccctgttcaacctcacctgcacacgtgtgtctgccagtgggctcttcccccttctatggctgccagattccaactacatcaagggcgaagaccccacagggccccccgagcacgcacgctcaccttttgcatcacagacccatcctgtggccagagcccagggtcaagaggagcacgtctggcagagagttcaaagaggcgtgctgggctccgctgcctggggccgtgtaggccaggtgtgtggcatagatcttcctctaaaccctttgtactttctccctcacttctttttaaaccaccttcccttgcacactactccactgaattcatttttgaaattctggaagttgtacatccaggtcaccgcttatcagttgtcatgaaactctccttcgaaagtgaaaaactgacatctctgcggtggagacagggaatcaaggagcccggcactgatgacaggtgcatcgcttcctgcaggaagagacttgtaggcttgactcctgccgggagcgcgcgtggctgaacgggggctcggtatccactttggaagattggatatttggaaaccgcagagcagcttgcaggaagcgtttgtgtttgtgattagcttgcaagaagagcatggcgggccgtgagcaggtctgtgatctcttactcccaggacagtcccttggccctggactcactcgttatttcctgggctgtgacacctgaaagaaggaagactgaggcaggaccttttgttagcctgtgtctgacctccaggacgctgagctatggcccggctccaggcattgtggcctgggatctgagagtgtgaaactcactgcagaggatgccgggccttctgcctgcgccggagccctgagtctccccaggttgtgccagcagctccactctcctgggcacatttcctaaatgggcagtcagcggctatcccagtcttacctgcctctccttcttgcctcttccagtgtattctcctccatgccgctgcccggcccatcaatattcttataccaaaaattagatcatgtgactgctttgctccaaatccatcagcggctctgtatcccatttggagtgaaatcagaagaatctcttccacaggggccctccctgctctggtcaccgctgacctcgtttactgttcaagattccagctgcgtgaaaacagggtctgtgttttgttcaccagtgactgcttagtgctgtcttgcacagaggcagcaatctgtatatacttacttgtggaataaatgccatgtttgtcttctctaatgggctgtatgtttctataagttcatatgcataagatatatatgtactgcgtatctggaagcgtgggtaaatgctggctgatactgtcattaaccggtgtatcttcatattagccaggaagcttttctattaaacatttcttccctcttactaagcatctactgtatatcaggccctgtgcacagccaggaggacacaccctggcatgagacaagtagcttccccacctttagaaaaactacatctagaatcagcatagatgatccacccatatactgagtttatattgtattttaaaaggtttatttccatacttaaaggtaacaataattacaggtctttagtgatgctaattcagaaataagtagtattttgctagtttttccaagagctaacaattagctccgtctctcttgctggtgtgagatgtatttcatgtagatattagcagggggtttaatcaacacttccatacacagattatctatataattatgctcttcagtggccccatatttatttccacccagggctaacatcgaacctttactgaaggtggttttaacccatggcgtgcagcacagagggcactggtgtgcttgtgtgagttagcctcgtgcttggccgtgcactggtgtgcttgtgtgagtgagttagcgccgtgcttggccgtgcactggtgtgctcgtgtcagtgagttagcaccgtgcttggccgtgcactggtgtgctcgtgtgagtgagttagcctcgtgcttggtcacgcactggtgtgcttgtgtgagttagcgtcatgcttggccgtgcactggtgtgcttgtgtgagtgagttagcatcgtgcttggccatggcagtgagttctgattgcagggtctcaacgctcagggaaggacgagtgccccttctgtgccattttccaaaactctagggatattgagtcttgctcaggtcacccaaaggcacatgtcccagccccgagtcaagcgtacaggggcctcccgggagcacccttgtgcctgtcgcggcgttcctctccttctgccgctttcccaccccttatgaccggcagcctgtttcacaggggtcctaggtgcggtcagcccccgcctggaggccacggggcgccctgagcagtgtgtgggttggactcacacctgcaccgggactctggcttctccatttagttgccctgttacctcaggcaggcggccccacctcgcaggtggccatcgggggccatctggtcagcattgctgcaggggacttgcaccaacctcctctcctccaaatttaataattcccaattatttttttatctatattcatttattttctagtgatatcgtggttttagtatctttctcaggattctctctgtcttaatgttaaacacaattgtttaaaaaatggcattccgattttcagtcattctgtctttgaggctgtgggtgggaagccatcggggctgggcgtgccaggcagggccccagctctggggtggaagggaggccctgcaatggtcctgctactgaggcaatagaaagtcacaggggagaggagagtcccgcaggaggaggtgatggacccactgggtggtgaagaacagtttctcttccacacatttatttagaagatggcctcggccaggacggcagcctgtggtcccagggaggaggaagagtgagccaggtgccgtggggtctgtgcacgtgccagcgcttttaatgtcaccgtctctttattaaagtacataatatacactcatgataggaagagctgaaaatactggaaagaaaataaaaatcctacagaaccccagtatccacgtgaaactatggtgacaccttcgaacagttccttccaccctcttactcctttgtatacgcagctatgtatgtggtttcgcttattgcagtgggaccgtaccctacatactaaatagcacgaggcttggtcgcttagcagtaaccatgcacacctgctgttttatacatttacatcactattttaaatgactgaattcaccattatgagataactgtcgtctatttaagcgtcctttatgacggttggctgagttatctctaatttttcaagttcataaataacatggggatgaacacctttaatcttttttgcatttgtctattatttccttagatacattcttaaaaataggagtctgaggtcacgatgcatggacattgataatgcttctaataaatacttccatatcatcttcagaaaaacccgattccatacatccccaccattggcattagagaaaagccactcaaattcatggaatcttgaaattgaatttttcctgggtagattcccaagggttatacttaggaattaattcatggggtgatttttttcaaatgaaaaaaaaaaaatacattttcctttcccataatgccaaagaaaaatcaagaatttttttttgggggggggataaaaaatgatctccctttattactctcccaaaggttaccagtgtttgaatttatttatttatttatttatttttttttttttttttattgatcattcttgggtgtttctcgcagagggggatttggcagggtcataggacaatagtggagggaaggtcagcagataaacaagtgaacaaaggtctctggttttcctaggcagaggaccctgcggccttccgcagtgtttgtgtccctgggtacttgagattagggagtggtgatgactcttaacgagcatactgccttcaagcatctgtttaacaaagcacatcttgcaccgcccttaatccatttaaccctgagtggacgcagcacatgtttcagagagcacagggttgggggtaaggtcacagatcaacaggatcccaaggcagaagaatttttcttagtacagaacaaaatgaaaagtctcccatgtctacctctttctacacagacacggcaaccatccgatttctcaatcttttccccacctttcccccctttctattccacaaaaccgccattgtcatcatggcccgttctcaatgagctgttgggtacacctcccagacggggtcgtggccgggcagaggggctcctcacttcccagtaggggcggccgggcagaggcgcccctcacctcccggacggggtggctggccaggcgggggctgacccccacctccctcccggacggggtggctgccgggcagagacgctcctcacttcccagacggggtggctgccgggctgaggggctcctcacttctcagacagggcggccgggcagagacgctcctcacctcccagacggggtcgcagccgggcagaggcgctcctcacatcccagacggggcggcggggcagaggcgctccccacatcccagacgatgggcggccgggcagagacgctcctcacttcctagatgggatggcggccgggcagagacgctcctcacttcctagatgggatggcggccgggcagagacgctcctcacttcctagatgggatggcggccgcgcagagacactcctcactttccagactgggcagccaggcagaggggctcctcacatcccagacgaagggcggccaggcagagacgctcctcacttcccagacagggtggcggccgggcagaggctgcaatcttggcactttgggaggccaaggcaggcggctgggaggtggaggttgtagcgagctgagatcacgccactgcactccagcctgggcaccattgagcactgagtgaaccagactccgtctgcaatcccagcacctcgggaggccaaggctggcagatcactcgcggttaggagctggagaccagcccggccaacacagcgaaaccccgtctccaccaaaaaaacatgaaaaccagtcaggcgtggtggcacgcgcctgcaatcgcaagcactcggcaggctgaggcaggagaatcaggcagggaggttgcagtgagccgagatggcagcagtacagtccagctttggctcggcatcagagggagaccgtggaaagagggagagggagaccgtggggagagggagagggagaaaaatcaagactttttaagaaactttaattgttgattagttgtgtatttacattgtatgagaagcaatataatcttcaaaacacagtcatatgtaagattctttaacttttcacctggctcttttgtaatttattccacagttttattcattaggtgtctcttagtccatttccgaggttcgtttggcatcaaaaacaacttcctaaaaatgtttacaaaggaaagtttacaaaggaaattaagttaatcaaagcaggatacgaattctgtagggagtgtggtctcaccactgtcagctttgcccaggatggccagcgccagtggccgttaaaccagtgggcagagctctccatgcaccagcacagactgggggccacgctgcagcccgggaaggggctgtgcagggccagctgctcctctgagacgggcagacccagccccgctctggacagggacacgggggcctgagccagcctcgctctggacagggacacgggggcctgagcccatggaaacgcgtctgcggagtccccagtgctggctgctgtggggaggaggcgacactgggtcccagggtggaatttcagtgtcttcatctgagtcaagttttgcttgttatcttgacaaggatattacgtttgtaactatattaatagcatgtgtatgtgtggtaggtacacacacgtaattatgtatgcaggcatatatgtgtatatgtctgcttgtgtgtatttcacatgggaaaacggctggacacacacctgaaaataatcaccaagggtccttctcagggttgggattgtgagtgtaatttttgtgctttaaagttgtatgtgccctgtagtttccagtggatgatatattacttcattgacacaaagtatgtaaatatcattttttaaagtacacactgacacacacacttacacacacacacatacacagaacactcatttcagccttgcggagagtgacaaggcaagtaggatccagttaaaagaaacggccatcgttccaggcatggctgtcccaggacaaggggcctctttgaccactgccgtgttctcctctctctctgggatgaaagcccactttctggctgggccctagcttcaggaaggggaagcagaaggcagtgcccaccggccaggaagctccactggccaagaagctccgctggcttttgttgttaggttgtcagtgtgttccatcagttggtcagctctgaaagcagcctccgtgggtcattcattcattcattcgtgggccaggccctgttctgtcctgggcatggggatgctgcagggtcagccagcacaagtccctgtcctcagggaccaggttgtcccatcacctgcagggtcacctgtatcacctgcatgcagtcggtgaacggcacagcccaggtgaagtgtgtggctaatagagagcagccgagctccaaggctgcatgtgcctggagaggacgtggttctgaacatcaccttgttgtaagagtgtgagaggctcgagggtgacagcttcagatatcgtgaacagtcctgaagggacccagaccacatgaagccacatcaccctggaggagtgagaggggctggtggagctgagccctgctttggtggaaagtgtggatgacatgaaggtggttgaagactggctggagacgaaccacccaccgtgctctctgacatgctcttgcttgggatacacagcagggtttgcactcttagttaggatgttgcttgggaatgcatgctgaggcgggcaggcgcgtgctggggtgggcaggcgcgtgctggggtgggcaggcgcgtgctggggtgggcaggcgcgtgctggggtgggtaggcacgtgctgaagtgggcaggcgcgtgctggggtgggtaggcgcgtgctgaagtgggcaggcgcgtgctggggtgggcaggtgcctgactggagtgagcaggtgtatgctgaggtgggcaggtgcatgctggggtggaaaggtttgtgattgggtggacaggtgcgtgttggggtgggcaggtgcatgctgggaaggacaggtgcatggccagtgtggtcaggtgtgtggctgttgtggggcgcagcctcccctggctgaggcgtgggtcagtgtgcgtcgtcaggcttctctagctatggtcataggggcctctgggctccacagccactctcctgggtgggtagatgtgcttccctgtgtctgaccaggtcacctgccattctgcatcgaactgaacctcagaaaatctctcctcccaggatcgtcccctgcattcgtgaataggaggtgatgccaaaggcaggggtccattcctccaggaaagctgctgtgtggctgcgggcaagtcctgtgcctcagctgtgaaaggacagaaccagcccaggtcttaggctgtgtgcagaggcttgggacacaggtgcatgtggaggctgccagccttcacaaccatcagcgctccatgttgtcactgcccagaaacgcccacctgggatgcactggacacacctcaaagcagttgagtacagctgaggcccccagaggcatgtgtcttagagcatctgcagagtctagagccattcttgggccagagcagacgcctggcaatatttgagcaaatctaatgactgggcttatgccaaacgcacgctcagtcctttagggtccacccagagggatcatccctcccacccagggctgcgtggacaagacctctgcaccctcctcttcaggagtcagatctccttctcatcctatctcatgcaaatctgtttttgacacaaacttagctgctaacaaaacaaggttgattctcctacatgctctgaattacgtacgcagaaggaggctctgctccccaaacgggttgcttccacagaacctcaaatggtaacctgtacacacttcgcagatgtatctttgaataacttctatagtttaggggttataaagatacaaccacaagactattttcaaagcaccttaataatgccgagcttaacctattagtcttctgcccttttttctcatttaccaaaaaacattctaaaggatctctgcggaggcagataagtagtcttccaattccccagatggggaaaacgtggggcagagtttctcctgccctattcaaggttactgtgaaggagaagacaaactgtcctggaaagatctacagaagttggatgggccttccatggctttgtgcattgacatctgtgctttgctgaagggacgtcgatcaaaatgaagatatttgcagaatgcttaagaatataaatgcagcattcacctcgtagtaaaatgtggagctacatgggatttgtgatgggccaaaaatcaatagtgttaaatccatgtcagtaaaataacctaatcctttaaaaatacagtgctgtgcccatttgtgctacgtcacggtgccgggcctgggaaggacacatgtggagtgaattagaggctcgtcaccggtgggagccaatggcactgtgtgtcttgtggttctgctttatgaccctttactggagggaagcagagtggattaagggaacagggccccacacagctgattatttcaccagctaataagtctcccaggaccccagccaggcacaggagctccagccttcctgcaggtgctaagatctggctgcgctgttggctgttgcttcccctggaggctgctctcgcttccagatctctctattagagagggttcaaatgcatctgcaacccccgagccatcctcccttccaagttccagatctctattaaagagggctccatcgcacctgcaacccccgagtcaccatcctctccgagctccggatctctgtattagagagggatccaacatgtctgcaaccccgagtcattgtcccctccgagttccagatctctctattagagagggctccatcgcagctgcaatccctgagtcattgttccctctgagctcgcaggtgcccaggcacctcagagacacttccttccacttggggtgctctgatctataggctccgggtgggatgagtgtccagggtaggaccccgggagcctgccctgcacaaaactcaggaggccgagtacctgcaaggagcaaaggatgggtggcccaggtcgttatacacaccagtgtggccctgggcaggggctcgccaccccatacatgtcctggcccaggagccctcctgtctcagcaccagctggggcccgggcttgggggtctggggcagagctgtcaaaagcccaagtacccaggaacaaaggaactggatagtcagagctgggggaaataccacccccccactcccaggcagcaacacccacagtggacatggaggcagacaggcctggtgggtgaggccgagggaggaggttgtcctgtcctagtgaacccagggaggaccagggtaggggggagtgacatgcggagaaggtgtccccacaattcagagtgaacccttagatctccctacatctgtggcccccggagcagcggctcaccctcaaggcgtttctaacaggcccccaggctgctgtggctggtcttgaactcatggtgagaatcaacctcatactccaatagtagctcccaatcagtctaacactaaactgttcacggtcgtagcacccagaatgtatttgattggtaagtgaaatcaataacagcaacacccaagagacaggaaggagggcctgggacacgccacgtgaggccctgcaccacccgtgacactcgtgggggtttgaaagtggacttggattcttgtacatcgggttagtgtagattgcaaactctagggcaaccactaaaacattatgaaaagaagcacaattgatccgctacggagagaaacagagttttatagaatgctcatttaaaaccagggaaggcagaaaaagaagaaaatgaaaagaaacaaagaacaagtgcagggaagagaggggctgcgctgccccccacctggggaggggtctgctcagtggggcctggaggaagctgcctgcttcctggagctctggcctggctttcaagtgagcgaagggtctcagcggcttggagacaggaggagggtgggcctcaggcatccgaggcttggaggcaggaggagggtgggcctcagccatctgaggcttggaggcaggaggagggtgggcctcagccatctgaggcttggaggcaggaggagggtaggcctcagccatctgaggcttggaggcaggaggagggtgggcctcaggcatccgaggcttggaggcaggaggagggtgggcctcagccatctgaggcttggaggcaggaggaggggtgggcctccggcccaggagctggggcaggctgcttgcagcgaaggcctgggtgaagtgggcgggcagaggcagggctgcagctgcagcctctggaaaaggaagcagctccaccttctcctttggcttcctcagtctgtccccaccgtgtctcctggcccctccccaagcctgtctctgttcctgagttgtctattccatgcacagtggtggaaaagctgctgagcagggttctggactcctgcttttccggctgtgatacccgctcccaagggggcagctcctcggggatctgcaccagcggtcttccaccccggagctaaggatggaaacacccacaggtggctgcggccggctgagccttgggtgacgtggcgaccttcctttctctgaccttcgtctctgggtggcccagcagcccccatgggagccagaggccgcccctccccgtctttccttcttgtcttcccctgccttggagcgtggccctgctgccctccacttacaacagaaacgcccgcaaggcatctgttctcttcttatcaaacaaagagtgtttaataactataattaattcactttggtgctcctatgaatcagacatattagacagaagtcagtgaatgttagcagtaaaatgcctcgaagtgttcatcatcgaaggcaggtgacgccgggactcgcttgcacctcactcttggttctgctttcccccaagtcctgcgtgtatccattttcaaacatcagccgtggcaagtctgttacatgtgggtgcgcctgactgtttgaatatggattgtgtttgcagctcaggaggcagaggggtggacggggcggtcgttcccggcaggacctgtgggttcgtggatgtcactgagtctggaccctctgagtgggatgcgacctcactcttggcttgggtcccagaaggcctagtcctcagccaccctgggccacccgggttttgtttggctggcagttgctttatacctggttgttacattgaagaagtaggtgcttcgtggagatacctggactcccgcgtggaacacccagcaggggtggaggagcctctttgcccggtttccacagtcctggcagctccacctgggcagccttaccgggactcatggtcccgcagcctctggagtttgtgactttgctcaaggccagcactaatgagtcctccatccttttctgctctgaattgctactaagagcagattctaaaaaattctagtggctttaacaggatcattgccagaaagaagccatggatggagggaggcggcatggacaggaggcatggcgggggggggggagacacagtgccaggctcatgccaggtgggtgcggtagggcagcttcttgcatgttgcacctgctccccaagctccacctgggaagggccagaagggccatggctgtcaccgtcagccggtggttccgcccgtctgggagctgggaggccagcaccccccaggctctcaccaggccacctctgcagggccagctcagccagatgggaaagctggattttgcatcataagtcttgtgttttcagcttggagggtggaagtgagcacatcattctgcctcaacaacaggagggaaaatgtcgcaaaccaaaactaagtctctgttagaacaaggtggtgctctcagatagccctttaagtgggctttgctttctgacttttttttttttttttttttttaacactcatacatgtcagagttgggtctataaagaaactcttcttttttaatagctggaggaagggcctacagttgatgccatctgcgtcacgggcatgatctgacatgcgtcttcccaattaacccaggattaaaaagagggtcttaggaccatggatccttcgtgtttgtcacctttgcctttgtgtttgtcacctttgtggcaagttgttgcaaagacgtcacagccaccgcacacatttccactttgggtctggactgaccatctttgagtgtccgcccatcattcaccaaacactgacgcggctcgtatgacaggccaggtctctggcaggtgcggagggtgggtgcgccttctatggatccccatttaaatgacctcattcacttgatattgtgccgcggtcctgtaacatgcaactgttgtaggcactgggcaaagggtccacagggcctccctttgcaactccctgtgaacctcaaattcttccagggtacatgttttttaaaaggttaatttgtgaaaccccaggtgtgttggaatgtcacatcctatctgccttcccaagctgggtttctctgggatttacctccaagaagcagccttccatcccccaccacaggcacagacctcccctttgaaccccaactgacccccctaatctgccatggcctggtgtgtgatcgatgctggtagaccatgctttgagggaagttgtaaagacagagttcttccaaactggacctgcgctggactgcttggtgagagcgcgtgggaatggccgtggcagaggtaggccctgggcccctttctggagccatcgctggcttcctggagccgcacagcgcaacctctgtcagggcaagtgtagcaccaggttgtgctgtccaattaatgatgaaacaacctgtcctcaacgttctcagctccgtgcgcggcttcaccattccgagcttgggaggacgagggcggctgcccaaaggcacagggaagagaagcctgaatgagactcggactgaaagggacaggagctgggggctggggggcacaggacgagcacacagaggccccctgagtccccagctgtggctgtgtgcctggaggactggggcgtgaggaaaggacatctcgcagggcgtcaagtgcactcagtccccaggctgattagagagaggaacggacagtgtctgaggtgaagctgtgcccagctgctcgcgtggccaacacagggcggctcacctggactccggccagcaagactcgggatggcgagggtacctgtgcacgcaaatgggaggtaccgtttcctgcagcaccccagggaggctcacacagtgccctgccctcctatctccatgtccgcctacagggtagagccggtggtgcaggcccaggatcgggacacaggtccagcagaggactgttagcggtccctgactcagcacccatctctgtccactgagactctgcctgtccctcagggcctctcctcctcccctccccacaggcactggcacagcggcccggggtagaacccatggccctgactcacctccccctccaccatggtattgatgacaatgctgcccagcgcaggcagtgtcgacatgaagcaaaccattgttaaaatattgactggaggagaaatggaaatgaggctactgggcctgcagctccatgagtgtccacgcctccgtgtgtggactgatgaggtaaacgttctgtgacaaagcccctgtcccagaggagctttcatcgagggcttggcgcccacgacaaatgagtccacgcaggaaaggagtggcacccgcaggaggcctgtgctgcggagctcctgggagggtgacgctggggcaggggctgctgcggacaagcgttgggaggcctctctgaggaggcagtgtttgcgctgaaacctagaaaaagagctgcgtaaaagacaataattctgaaggctctgggtcgggggcatttcaggcgagggtcctagaaatgccaatgctggggatgccgccgagtgggtcagaggggccggaggaaggtgaacagggcagggggcagtggggctggattttatcccaagtgagtcgggagctgctgggacggcaggaccgggtgtgtgtgtccaagagaccatcttggctgcccaggggaagcggggactcgaggagagcagggagtgctgtcttcccggcgggagctggcggtactgaggaaggacgtgcagaaccaggcagggctgacagacgcggggtcgggggaagatcaggagctcccggtgtccaggctgcacaatgtgggcaccactgaacacggggtaaaccaatcaccagtcactcccacgctgggtcttccagctccctcgaggccgccctggccctccacactcccaccgctggcgccagcatctgtgcccgcggcagtttagagtgacactgtcctctgtccagcaccggtccacgttgaggtgtctgtgtgccaccgggacccttccgtagacatgcaccatgaagaccaggcctggtgacaggtgctgaggggtccaagggcattgtgtgggggctgaccgggcctcagtcagtgccagagaggacgccctgcatgtgtgatttccactgaccctgcaccgtgggccatcccagcctctccccagtggaaatgcctccctgcacagggtcacaccacttgcctctagaatccacccactgggagagcaagtccaaggcagaccctgggcctgtccgcccaccctcctggagctgtgctgtcacctgcctcttgacatccacatgccccaggcattgcaatggccccttgtttattcctgttgctagttttaagtcaaaagcaggatgggaaggataggggactcctgggcctgggagtggggtgggggcagaaaccacagctggggcatggggagagctggtccccactcctgtgtggctgaacaccgcggcctttgcagcattcttccttgaagatctccgaaaatgcagcagcctgcatcagccgggctgggagccgggcccaggagtctggttttaaagcagcatgcggaaagctgagaacccacaccgcatcaagagacccaggagcaggtcttgcccccaagaccctcacacgaacacttctactccctgagatgcttgtgttcagagatagagcctgggcagcccagagaagttctctcagccaagattcttccagtgacatctgtggacgttggctcagagcccaggcttccacctcaaacaccctgccccagttccttccttccaggggtctgcctgctgagaaatcagcagactcccaagaaatccataatctgttgctctaatgtggcgtcttggtgtccacaatttagaccaatcttttcaacacttatttggaagaggaaagcagcatgaactgaatgaagtttcttgaaattagcaacagtcatcatatctgaacaaagaggctgcccagaaaataagtttgacagttgaaattacttctaccaacccattcgtctgagattgagtaaatgaaaatctctagctgccaggatgtcaccacgtggggacgtcgctggcacgggtggctcctccctgagtcagaagggaggtgggacgagttgagaaggacaatccagccggatccgggtgccgcagcctgaagggcccgtgtctgttgagctgatagtggcgtcttggtcacacatcacagacgggaaggcgagcaccatgctggtgggctgggggcggccttggcctccagacccaggaagctgccaccagggctcccgcccttcaattcggcagctgtttctgctgttctctggcttggccagggtgcttaatgctcactcgtgaaatggcatacccaacaatttgacctttcatcagttaagcgatgctaaaaacaaaagcagcctggatgtgcaactgtgggttgaggggaggctgcccgcaaagaccagggtagtttctcatcaagggtttgcctttgaatttgcagagtgccttctttccctgggttctcccttttcggagagccgaggtccccgtcagatctcctagtgggtgataaattccccccatgaagctcacgtcccaggcggaggggcctggagcatccaccagcagcgctttgtgatgatggatgcgaacgagtgctcccggcaggctcatgtttattcatttttgatgaggtgtgcacgcagccaagggcagctgagctgtcttacaatacacgggggtcacctaacatcggatttatctccgacctttgagtgtctacaggcaggctggtggctgctgcatgcacagcgtacacggtcctccagcaaaccacagctgcattctctggaccctgggaatctgccaagcgatattggctgtcaggaagcccaggaaaatcgcagcggtgggaccgaggggcacctgcggctacatattaaggtcacgcgttggaaggttggttcctgcagttctgggcggggtccaggtgggagaatggctggggactccaaacgctgaccctggccatcccataccatccagccagccccacccaaatggacgttggggcccaaatcccacttgtgttttccaaaacggcagacagaaactgcaagccccatcttaatcctggcttgcaagtaaggccatggcctcctgccctcatcgtcaggctattcttgattttccctgccaaaaagtggggtggctgttgccacactttgtccaacagcagtcatgcctccccacaagagatggctgcacagatgagagccacggtgcctggagctggggagtcggccctgtagacgaacttgaaattcacctgaagaaaagctgctaagtgaacaccagctgctgccggcacagccagggccactgcgtccctgcagcccgaagaaatccacttctgcccttggtgctggagccaatcccactggcagtgcacaggcatcaatgctatgacttccatgaaaacagccatgggctcaggcggacagactccctacagagggaggatgatggcatggctgatgctggccgaggtccactgaattcagagtccacatggaggacggagctgaggcctagggctcacagaggccacatccgcagaactgttgcttccggagggccagcccaggcaggactagggactccaggagggatcccatccccctgcagagccctgagaaccccctccgccccagatcgccactctccacacacagctcctggctgaccagatcttaccctcgatggggtgttgggaatctgccggccacagtggcaggaagctgctcacagctcactgtcaggaaagggtgaaagaggcatgaatccgaagacagcagagtctgggcccagcttccgcttcccctgggagtgtggttacacttgccagggtgggggtgctgtcttgagcaaagcctggagaagggtgagaagcatccctcacccgcacacccggtcagtctgtatgtccagacgactgctccctggcagcccacgcagtgctggcaccacagtctgtatggaccgtgccctttgggcatgacgccaccatctcataagctgcacccagggtccctgtggatgtgcttgatcagagaaaattgggacaatgtgatggaggcaaagaaggggccggtcaagccagcacctggagccacagtggtgtgggaggcagggagcatggggccaccccaccctcaggaaggctgagagggtcttgggcaaccaggtatgtggagaaacagtcggccgggatggccctgctcacggagccctcgatgcacatcccgcccaccctggggctccgcatgcagcatttctatgcacaccatcctcaccattctgtgagccagggaccaccatgagccctcttgacagatgaggaaaccggggaacagagaagcggggttgcatgtcaaaggtcacagagccagaaagtgacttgggactcaaaggcggatctttccgctttcaaacctgtttccagagagggtggccggcaccagatgctggcataatgcgcccagacggccccactgcaccagctgcacatgtgagcatacacgtgtgcccccacacacaccctgggaggtgatggcccaggactgggtagggcctgggctttgtgtgtggcacacacacacacacctgcacacgtgcatgcacactcatgccctgggaggcaatggaaggggtcgggctggactcgggtctttatgtgccctatatcctgctctcagcccactgaccttgctgctgggtcctcggtgagtttcctggacaagcaggccaggaagagtgaatgaatgcaagggcagaggagcaaggaactcgttctgaacaggaaatgcacgtcttaaaagcaagactgcaaggcggagggaccccaccaagtctgaggctgccaaatgtcgcatgtggctgtcaggagggcagccagggagatgatcattgcagacattagagtaagtgctcttgagaggctggaagcactttgttgcccaaggcttctaagaccagagagatgctaagtgcttctatattgaaaagagtgagcattcctaatttgttaggtccctgctatcttttaaattctccaaccctaagagaagaaaagccctattctcctccagaggtcaggttgggtatcatcccagggaagccgagcttttatgctgtgtgcgcccatgtgttagtgtgtatttatctagcgggaggagctggaagctgtaggtgcaaatgggtgtgtgcatgtgggtggatgtttatccctctattgacagacagacacgcacatgcatgtgcaggcagggggaatttagcccaggctgccccgaagccgcagaggatgcacctgcctggaaaaggaagcacaaaaccctctgcacatgaccctgagaacacacggtgaatccagattttagaagccaaagcagtgccctgtggaaccagctgcccctgctggaggctgtcgtggggcgtgctcaccactggggcccatgtgcatgctgtggagtctgatggtgctgggttgtccaggctgccagcacctgctggccactgctgtccagggcaactcctcctgtgtacattcccccagccccatgagagaaaaagagactggggtcagagaggtgaaatggcacacccaaggttaagcagcctgggagcttcactgctgtaggatcaaagcccaggtcttcagagaaggttgcactgcatgtctgcactccagggggatgctggttccaggcccctgggccctccacttaccgcttcttgcttcccactgctgagtgctattgcagaatcatccagggagaaaggaaaggatgcaaggaaaacgtacttaggatccaccagcaggcccgggtgccttccaccagcacccgcctgttctcatcagagcaccgtccgccagcccctctctccagtctgtccttgggacaaccctgggaagccagtgggacaggtgttccaggaggacccctgtccagcgaagctcagggctgcggcaggccggcggcaggtcaggtccttccttcaccctcggggatggtgcctgccatagccctgggcctcctggaacccacgttctccagcagtaagttaaggagcgggcatgggcacacctcggggcaataattccctgtgaagggcattcagagcactatgggatggagaggacaggcttccccaaagacatgtgactgtgggcctggagagttaaagggagccagtcccgtggaggatgcagcaccggcaccccacacagcgagcaccacaagtgccaaggcaagcctgggccagggcaaagcctagcaggtccaccatctggtgaccggcgggatgggaatgggagcctggaggagggcccaggccacagagggccttggagggagaatgcacccaggagggaacttagggtttattctcacatcactgggagcctctgagggtttcagcaggagtggaggctgtcgatttaattggaacttaggtggcctatgcctcagcccctgttttcaagcccagaggaagtaaagaatggaaggaaaactgaagaagggtggctcaaatcccatcagaaacttatccggtgtgtaatgttcctggagaagagaagctctttcctgaaagtcaaatctaccactgagccagagtgatctttttctttaaatgctcttccttttgctggcaaaagagggtcctccctctcaatcttcccgtaccctccgctacaaaagactttaatgaaaataacttctgacagctgtatttttgagagactgatccaggatgggatgtgacatttcagtataaataaattgtataaatctatgcaggacacggctctgggagcaaatagaagagcgggttctgctcccatgaggtcactggtggacctgagctccaagcatgggaggcagcctgagacagtgtggaccctcgagctgtgtggatcggccaggctgcagcattaataccctttctagcaggagctgatctaatgagtatgaggaatgcatgacccccaaaggtggtgctgacaggaggcagatgctggccagggcatttccaattgcaggcaataaaaccatagctccgagtagctggacagcatggctgccacatgacatgcagggaaatatggatttcaggaatggctagactcaggtgctctgcaacaccaccaacaagctctcgctgcttccctttgagttgactctgtgctcaggcaggtcctcacccccatgctggtccccaacagcttctgacttctgtccttaaagttcagtaggaagagaaaaactgttttcttcccccatagttccaggaaaatattgggagtgactgtcattgtcccagcctcagtcatatatccacctctgacctggtcatggggtctaggccatggcctctgtgcactggccagaccagcatcacgtgtcccctgatggagccaagggtgaagtcagcccattcaccaaatggaccaagataacaaaggagtggttccctaccgaatactggaggtaccattgccaaaagaggagggaaacatccaaagctttgtccagcactctaggaggatgctggaaaaagtgcaaagcacttgtttttgtatggggagtgcgaggctgatgaggctgttcaggaaaagcaaaatcaaagtggtttgtgaggattcccatgacttctgtggccattcttatgggtggggcccagggtgtcaacgaggatgagggaaagggatggaaatgtggggaagtctggggcactgttctcctgttgatacgggatagaaaggaaggaaggggctgggatcagtggagtgaggggttccaaacaggttttgctgcatctcagctccaaggccttctccacaaaaggaagggcccctaggaggtaagactgaggaaaacagactcagccctaaaaaacctgtgagtgtccaggtataaactctggtccctgcccttagtgaattacatgtacatatcaaatccggctgcacagttaacagtcgagtgtgtatggcataagggtgaatggataggtagatggagggatgggtagatgggtggatggatgatgaataggtggatgggtggatgcatgatggttgggtggatgggtgggtggatccgtggatgaatggatggatcattggatggatggataaagaataagtggaccaggtgcagtggctcatgcttgtaatcccaacaccttgggaggccaaggcaggaggatggcttaaggccaggagtttgaaatcagcctgtgcagcatagaaagatcctgtctctacaaaaattaattttaaaaattagctgggcacagtggcacacacctgtagtcctagctacttgggaagctgaggcaggaggattgcttgagcccagaagttcaaggttgcagtgagctgtgatcgtgtcactgcactccagcgtgggcaacagagtgagacctggtctctagaaaaaaaagaataagtggatggatagatggacaaatggatggatggatgatgaataatagacggatgataggtttgtggatggatgatgaacgggtggatggatggatgggtagatggatggatgggtgtgtagatgagtggatagatgggtgaatggatggataatggatggatggtggatggatgggtgggtgggtggatagatggtagatggataaatgaatggatgggtggatggatgatgaatgaatgatgggtgggtgtgtggatggatgatggatcaatggatcgatggatagatgatggatgggtaggtggctgggtggattggatggatgcatgggtggaaggtggatggatgaatggatggatggatggtggatggacagatggaggatggatggatggatgagtaggtggatgcaggatggatggatgatagatggtggatggatgtatggttgaataagcgggtagatagatggatgaatagatgggtggttggatgtatggatgtatggacagatgggtggatgggtggatagatagataaatagatggatggatgagtggattggtgggtgggtgggtgggtaggtggttggatgagtgtatgggcaggtgaaaggatggatgaatgatcatatgggtggatgggttgatggatagatgaatgggtgggtatatggataatggatggatgatggatggatagatgggtgtatgaatgcatggatgatcgtatcggtagatgggtgggtgggtggataaacagatgaacgggtgagtggatggatgggtgtgtggatggacagaatattcctccaaaagcatatcaggtgctctgtacgtggtaggattgtgtgccaggtgctgtccctgtcctggagattccaagacgaattatgcaaagcccagtccatcaaggagccctccgcaaagtcagacacacagacttcaatcaggtgtgtatgtgttgcacaagagggtaggccctgtccgtgaagtgtgttcacagcttccacctccagcactgtgcttgctgtgtagtaagggctctgtgagaaatgaggtgtgattccaatgagtgaaactgcccatagtcaggacaacacctgagaccacgggaggggcagcaagtctgagccgagtctctggggtggacagtgaggcatctgccaagggtgggagttggtgctgagcatccctcagggtcactggcagagactggaatcttcactgggaggggtgggagaagattatggagcatccctgggaacccgacggggctcaaggactggggccctgtgtccctgctcagctgggaactgcaacctgacagggatcaagaagggaatgggtgaggcgcaggcctgaggggaggggaagaggtggggagaggaggaggtcatcctgagttatccagtgggtcctaaatgccatcactagtgtccatagaagaagaagaaggaggcaggagagtgacagagaaagaaagagacgcagagagaaagacaaagatagcatcagagagagagattggaagatgctgtgcttgaggatgaaggcaggaccaggagtggggatgcagacggcctctagaaactggaaagacaaggaagggctttctggcctggagcccccagagagaacgcagccctgcccacaccttgacttcagctgcccctcctgcacagtgacctctagagcgctgagatgtttttggccaccagacttgtggttatcatcagagcagccctaggaggctcaggacttcggagcccctgaatctcagcggcagctgcagcatgagtccatcctggaaggaatccaaggacagctcagggccagcacctgcttccggggcaatctttttgtgcctccttttaaaggcccacgtgaagggcatggtgcttatcaccgtggggcacacagggaggctgcgtgcctgggccctgcccttctgctcctagcaagcaaggaggcagttgaggagcctggcggttttcaccttagatgaaatgtcaggtctgatattccgtgggagcagctacatctttgttaaggtctcattatctcaagaacacgtgtccagggcccagaaggccgcccgttcttgaatatttatccatccttcctgggtgaccagcctggcaggctggggagggtctggcggttgagtgcagagttcattagtctgattcagcatgtctcaggttcatggtgctttcaagagacatcatgaaataaattcaaaatgggttatggagatgcccacagagcaaataacacgcgcaaattacctcgctgctaagggggaaataaaaatcacatctctcttctagacaatatgacaaaatgagacagaagtcagggaaaatgtccttcaggaaatcaaagtccttgcatttgcatcctgtgacgatctcctccaaattggcacccattgaaagattacatttttcagtcttaacatatatcttaagagaaacaaatggaagtcctcaaaagaaggcctgatcgggaacaaacctgtttttcacatgacttgaaagggctgcctggttttgggggtgtgcaaatgagaccttattccctagctttcttctgcagcccagaatctgttcagcaaatactccccaagcctgcctggccaggcaccgagcccagcacagcacacgcaaggaagagccaagactagtggagccccaagcctgagctgccccgagtcccgtggggcggagagacacagggtgacaagggcgaggtggaggagaggtggagggaggggtgccgagcttggagcaggagtcacagcatgttgtgtcgtgctggtcacagggcgtccagaccagggcccttgtggaagcagcatcaggctaaggagggtgggcattaactagaaggctgggagtgacaggcagcaggcctttcgtgcagacaatgggaaggacacatgacagttcacagggagcaggagaagccggctgctcaagagaccctgggcccagtgctcagcagggcccaccacttggggccacctccaccagcacagtcccatagaaatggcataagagcgcttctgtattcttaaattttcaggagccacattcaaaaaagtaaaacaggcaacatccttgttaatgctatattttatttaacccaatatatccaaaatgttctttcaacatccagtccatatgaaaaattgttcatgcgaaatctgacattcattttggggagtgaggactgcaaagccttatgtgtatttcatgctgattgactgctcagcccagttagaaccagcacagccctagaacctagactgtggtcgtcagcaacctacagtcctcaagccaagtctggccccctgcctattttgtaaataaagttttattggcacacagccatacctattcctgtacgtattgtctgtggctgcctttgcctctgctgtggaccaggtgagcaattagaaagagacattgtggcccacccacccacaatatgtactgcctgatccattacagaaaatgcttgctgccttctgctctagacagagatagaatggggtcttcattctagcagtgcaggaaggggctaggtctgagcgacgtgtgacaggctgctgttttttggcagaaatccctgcagctggtagatgtggcatgaggttgggtggaggacagctcagggacagggttagacggtgttgtgcccacctctgctttggggagaaggaaacaaccatcgtaggggctgaggctttgggctcagccaagcactcccatggaaacaaccatcgtaggggctgaggctttgggctcagccaagcactgccgtggaaacaaccatcgtaggggctgaggctttgggctcagccaagcactcccgtggaaacaaccatcgtaggggctgaggctttgggctcagccaagcactcccgtggaaacaaccatcgcaggggctgaggctttgggctcagccaagcactcccgtggaaacaaccatcgtaggggctgaggctttgggctcagccaagcactcccgtggaaacaaccatcgtaggggctgaggctttgggctcagccaagcactcccgtggaaacaaccatcgtaggggctgaggctttgggctcagccaagcactcccgtggaaacaaccatcgtaggggctgaggctttgggctcagccaagcactcccgtggaaacaaccatcgtagggctgaggctttgggctcagccaagcactcccgtggaaacaaccatcgcaggggctgaggctttgggctcagccaagcactcccgtggaaacaaccatcgcaggggctgaggctttgggctcagccaagcactcccgtgctttcagagtttgaggccagggtgcccctcactgtgctttccaaaaggcccacctgcactgtggagggttgctctacctggaggcccactgcacactcagcccagctctcccctcctcctgcccagagcacaggctcaggctcctggcactgcctgcttaggaccctcagacggcctcaggatgtcacagataatgtaattgggcagtcggtggggggagcctcagcgaggaccgagtgtggggtccaaggtctgagacttaattccaggttctctgaatggggcctgccagttcgaatttgcacgtgcagaaaatcacatccttccgtcattcccattaacattcgcctggtgtcaggaacggtcaggaacggtgggctgtaattgactcaagtctatttgccagccacaaagacaatctttataaaactcaggttaggaaatgaatagtgcgattgaatactgcggcccccagaggaggtgggattgcattagcaccttctttccattccaatttggatcttccaaggcatccatctttacctgaaaaagaaggtggatgggggagggatggtgtgaacaatggaggcccggggctccctcctcctgggtctacccctttaggagcagggtggagggggacagacaaaagggaggtgagaaaactccttgtctgcagggatgggtctgcttggagaccccgggtcaggctgtgacagtgccctggctctgtgcacccagccagggttcactgagtgtacctggcattctctcaattctctgcacatgccctcaacaaacaaactcaatcccacacacccccaggagcctatggaagtgaccagatgataaaccttgatgtaatacaaatgtaaatgatgctgcatttcagaaggtggtgtttgctgcgagaaagggaaagtgggatcaggatgaggcttggagtggaagggggttgctgttgtccaaggggaggtcaggggaggcctggctgggtggcctttgccaggggaggcctgactgggtggcctctgctggaggacctgatggggtgaggtggtgggccaggctgcagtgggaccagcggtccaagaccttggggcaggaggggctgtggtgtggccccagcagagcagaccaggagggtgctgaggaccagacagagagaggacaggtgcagtaggtccttcgtagggccttgtcacctgtcatgaggaccataccttttactccgcatgcggtagggagccttggagttgaggacccctggggtgtgcagtatacgcaggaagaatgactgctgggactccccagggtggagctggctggagtaggggaaggagcagggccctggcctctgtgatatctgcgagcagggcagactcctggttcagattcaagtacaggaaaagggcatttaacttacttaagatgacagcctgtatgcaatgcacgagcagcgccatttgcaggcagcaaacgtgctcaaccctcagcaccaggcacacagagaaagcggcctcccttctgtgggagggccttccctccagactcctgcctcacagcatgcagttcacttttactttttgttaatgtgttatagttggtgtcaatgtatagacctgacgataatacaactgtcttttttaaacaaaaaaacacagcactttacactttagatttttttactcattcagactacctccttctgcagcaggcacatccccctcagatccaagttaagagaggttagtgggatgcattctaatgacaaaaggataagtgggtaggtaggtgggtgggtgggtgggtggacagacggacggacggacagacggacggatggatggatgatagaagataggcaggtaggcaggtggatgggtggataggtggatggatggttagatagatgatgaatggatagatacatggatgatggatggaagatagatggatagtggatggaggacagatgataggctagatagataatagatggatagatgatggatagatgatggatgatggatgataaatgataggtgatagatacattagatagatgatggatgtttggaggaatggatgatagataataaattatagatagatggatagatgatacatagatggatgacagaagatagataatagatggataaataggtagatagatggatgatggatggatgatagatgctgcatgcatacacacataacatatattttggatggatgatagatgatacattagaagacggatggaagatagaaggataggtagatagatggatgatggatgatggatggatgatacatagatagatgcatgcatgcatccacacatacacagatgacagatacatagattatggatggatagatagatggatgatagatgatagatgagatagatacatgatggatggatgggtggatggatggacggatggatggatggatggtaaatataaacgtagatcagtatagacatgggtatatagaagtagcttcataattttctgaagatggtaactgggtaattggttcagaatcttcagaaggagagtaagtagacaggaaagctatcaacaaggtcacagacattaataatgcgaaagtgtggtgggcgcaatgacaccaggtagccaggaaagtaagcatctcagcaacgcagtttctgggtgcccgtgtcagtttcctgcactgcagtaacaagtgccaccaactgggcaccttaaaatgacagaaacatcttctctcctcgtcctggaggccgggagtctgaaatccaggtgtgggcagggctagctcccccaggaggctcctctgggagtccgcagcagccccactcagctctggggctccagctgccctggcgtccagtggcttgaggaagcctcaccccatccctgcctccagcctcccatagccatcttctccctgtatgtccttttctgtttcttatgaggatgctctcattggatccagcatgagctccaactctccttgcctctaattacactggcagataaggtcccattctcaggttctaggaggacatgaatttgggggacactattcatccctgcagtgtccaagagggagagtatgaaaatgactcaggttttctttttgccctgtggatttcacacgtgtctctgaaggttgcctagggttccggttggatctgtcttgttcctgccgcacccagagcccggaagagcgaacagcacacacggtgacaagggtcagaaatgctaccaggttgggtgggtcagtggctgcgtggcatggcctggtgtttgcagttcacactcagcgtccaccttccatctctgtctcctcatggccttcctttcctccataaaacacatccctgtgtcctcgtctctcttactctattttccagcttttttgcagcatagtatagaacagaggttctaaatttgagtgcttgtcagggcccctggagggcttttgtcaaaacacaagttgctgggccaggcctggaggtgaggggtgggtcccaggtatttgcactttcatcaagttcctggggatctcgctgctgtggcccagcaccccacgttgaggaccactggtccaagaaaacacagaaggctcctctagattccgaaagaatggcactccagttccagctccaccaacgccagtgcacacccaggaagccactagctgctggggatgtcagggtcctctcctgacatctgaggttaacagcagcacccatcaagatctgcggggcaggtgagcagctgcgtggggagcaggggcctccccatcatcttccgccactggtggtgctgtgagcacgccaaggcccaggagggagcctgtggcccctgtgtgtagctcccgacttaggaaggacgttctggtttcagcagcccgctggcctgcagcagaaacctggaccacatgctaattccacctggagcagaccccggagctttgctttagctctcagggcccccatctgggtggacttccaaggctcttcaccaggttctcatgagagagccattttgtctgtcagtgggaactgcccagggcctcgggtagcctgagagtccccaagaggagaccctcgtacccgagtgaagcttgcagcccccaggaagctgaggagcctgtccacagcctggggcacccggcggagaggaaaggggaagcaggaagccatggaggaccctgccccagggctgcaccctgcatcctgaagcgaggaacagacgccatctttaagcaccccaggacccagcaccacctccccaggaccaggggctccaccatagcccagtcaccaccccctgcccctgtcctccacaggagccctgcagccctggctctgtgtcaggatccagaccataaggagggacagggtgccaggctgggactaagacggggaagaagctgctgtgggacccgcactagggctgaggggcgctgggctgggcaaggcccaaatggcctgatggaggtggctcctgcctccgtgaccttgccccaaggtccctggccagggcctccattcagggtgaaatgtgatgggaggctgtggggagagtgagaaacaagacggtcactcagggccactgtgacagaacagtcaaggggacaatgcatgatgggcaggggctctaaaaatgggaaggaagggcagaaatgaggagtgggggaagggcggggagaaacacaaagagccgagcatcccccgaggatagaagggcgccctggtgtcctttctaaagaaatggttccctgtggattttcagagcttcggtagtcatggttcagcaagttcgatgctttcctggctgtttctgggatcgtggtagttggagcgttgactctgtagagaattccgtctccccgggatgcaggacctcggacagcctcagccagtgccctggaacctcagctctgtcctgagttcccccctgtgtcttcttctcatccagcgtccttcagagggactggatggaagccaggggtggccgcctgtctccaggatgcaccatttcttccctagagacacagcaggtggctcagaggctagctctctgggcagtgagggcagagttagaattcctatttgttccctccctttccacccatttctttgggaagacaaataggtgacattccagaaagaaacatgtagcttctctaacataatccctctgtgccgtgcaattattaacacatcgcttgagggcattgtggatgtgggccctccagaattcaagaaaatgtctctgcaagggtaaaacacccgccctcacgtcctaatggctttttttctctttcagccacacacagtcaaatttgaggcataatttgctgtgaattacctacaaattgtatacagtgctttaggactaagtagctttttgcaaggcttggtatgaattttctcttttgtccaaatcatacaaaatactctttctaaattgttaagattttctgccacgcataaaaatgaggctgaaatcacccaaaaggtgacaaaaatggattagacaatccttggaactttataactgtgtgcgtatttcaagggatctgttggcttctgagctcttgttctgaggggtgggagaattagacaatccttggaacttgataactgtgtgcattttaaggaatctgttagctcccgaactcttgttccaaggggtaggagaaaaagggggcatcatctagcagctgggaggagtctcaggatccccctgcaggaagcccggaatcccttccacaggcacagagctgagggtgctgcagagcccctaaagagctttctgggcatcgggaaagtccgggctcagtgcatgtggagctgccaccctagaaagccctgcgtcggtgttgctgtgttctcaggcccgtgcagctgacattcctttggcttcctggtgatggagggacagacagagcatccccacatttgtctttgagggtgtgtggtgtatacgggagcaagcaggttcagcagaaaatgacgtgatgccaaggccagggctgtgaacttgcaggagctgcctgtgaccccagggcaatctgggttgtcattgcagaaggaagcccagtgggtttcagctgctagtggagaacctatggcttcagtgctagcagttgctgtatcctgctaagcgtctgcctccattctgggtcctggcttctgggccagtccctgcctttatgacactaccttcatggggtgtgggaaggtggaccaaggaatgggtggatagagggtagatggatggacaggtggatgggtagatgatggatggagggatggatggacaagtggacagatggatagagaaatggatggatggatggttggacaagtggacggatggatagaggaacagatggatggatggacaggtggatgaatggacaaagggacagatggaaggagagagggagggagggaggaagggagagatagatgaatggatggatggatggatggtggatggatgatggatggatagatggatggacagagggacagatggaaggatggatggatggaggggtgggagaaggggagggagggagggatggatggatggacagatggatggatggatggacggagagatggacacacaggtggatggatggatgaatacatggataggtggagggatggatggacagaggaagggagagatgaagggacagagggagagatgggtggaaaagtggaagggaggagaggagagaacagggcattaaaactcattaatgataaagcaattactggaggaagcatggattttacctccccatgccaggaatgattttacctccccacgccaggaatgtctgatgtttctggcttagtgaagaggaagcttgggaagtccaaggtgattctaatctgtggaatgttgtattactctcacatttgtaggtttatggcatttgttatggaaacgttcttattgtggggcaatctacccgtaagcaaatcccctgaaggtagagatcagctgctcacccatctagtatttccttttatttgtgaaaatgcattcagtgagaaaatgtataagaaccaattgtgaatggttctctttcagctagttctcaaaaaatcctgtatctttttataaagatggaaatgacagcccagagtctattaaaataaatataaagtcaccatgccggggcctggcaatgggactggctgcttatggctttgattcaacattttctccctggaatgtgtttatgggagtttataggctgtgtgtgaatgtgcagagtacggagaagtgcacgcagctgtactctccacgtctgtgcagtatagggcagacgataagtcttgagatccatatgtttcttataaaattctgatctttggaaggatgagtaataggcattaagatggcagagaaagaaacgatcacaagaggaaatcatgcacttcagaggcagtttctgcttcacaaagaaagtctccagcaaaatctactgtaccctgcagtgaacggcacgggttgctttccttggagctgtcacggtgtatctggtgtcccccgaaccgcgagtcgtggaggcccgtgggcaggtgccccgggagtgcggcccaggcagatggtaccagaacggggtgccgtgctagaagagcaccccaaactgcacgcatctgcttcctcagatcccgcagatgggccaggtgttcagaaccttgttggtagcttgtcagtcacccacagagtgagatgcatactttgttgatagaatgagatttaatgttcaggtcaaatatgaaaatgtgtttgcttggaggggcatgatctttctgtagaagactcttcctgtcatacagttaccactcactgtcctcttccttcaagccaggctctgtgctaagtaaacgatcctgattaaaaccctgttttcattgtctgttcttgtacaagcctgtgcctgcctgccgtggggtgaggtgcaccgcctagctggcacttcacagtagagagcagccagagggatgggtgggagttgggaggctgggctcttcctggcggtgggtgagactgtagccccatcacaaccacatcatccccttcccaggagctcctcgtgtctggggaggtgggcgtggcagggactacagccagagctgggtctgtttggtgcttcttccctgtgtgtggattcatttaacagggttggctgatacctactgtgtagcagggattgcagtggcatcggacaaagcctctgccctctggatgccaaacattctagaaacccccaaaggaataaatgcagccgttgctgctggtgaaggaggccgtcggagtgctgtgaatgagggggactggccggcctgggaagtggcctgggaggtgctcagagggtggcaaaggggcgaccatgcgactgagccctgtgggaagagcaggggggccgcccagctaaggaagcagcaagcgcggagcacgtggcctcaacctccgtcttgcttatgctggttaagtaggtctgatgttaaccaagccaaaatgcaggggcagggacatctcaggaccttttatacaaaatagccttgagcctgggcagaattcggaggcaaccatctcctggccgcctgttccatatcacacacaaggtccagccccctgtgttgttctgcagctgggaatcctgggctccgtcctgggggctgaaaggctcctgggggttcagtctctaacctgctctttaaaattttagggctttcttgggtagtttcattttatctcaaagtcttacaaaccatcttagcgtttttgtgcaaacagctcccaatcctcgccagcacctgggacctgccacacccacccagcacagcagcctccctcaatctgcagcccacagccgcctgccgtgaccacccctcgatgtgggtgaggtttctaaactgctcctgaagcttcaaacacacaattcatctgtaaatatttgctcactctatttctaaccacgttattaagatataaaaacttaccgtgaaattcccctgtttaaagtgtacaattcaatggtccttagtcaattcagagttccatgtatagtgtagagttgagtatatgttacagagagcaactgttgctgtcatctaattgtgcaacttactcatcacccagcagggaaaccccgtacccataagacagccactcccattccctgccccatcccaacagccacaaatacaccttctgtctttccgtctctagatgtgtctagtctgggtatttgctacaggtgggattgtctttggggtggacttctttcacttagcacagtgtttttaagggtctcccatgcggtttgggtctgttcctgggaatatattgtgttgcctcactctccatgcgctgctactggcttcaaagccgcctccactcaattcatgtctcaaagcaacttggtctctccaccaccctttgtgtgaagcggggtgactgcccctccccacaggctcatgacaggggttgagcaagtgctctgtgtaccaagccattcttgctgtacctgcctcataataaaagcttgggccccttcatctcccctgcggagagtgcctgctctcatcagtcccgtctctcccctctggattgcaaaggccgctcctcggccccaccaccccgctgtttgtggcgctttctgtcagtgtcctgattcggtcctagtgaccaccaccttatcccagcctggtcactcagcctctgtgtctcgggctttgactacgtcacccacacccctttgcacagagtgagactgtcctcagaccccttcccgctgtccggactcagagcatccgaggcacctgccctgggagagctcctggactccagtcctcacggggctacccctcgtcccatgtgcaccctcagccccctgcagaaacctggaacacacttgattcaaaaccttcacattaatctcaggtgggatagtccgggctgtgggatccccactgggtggtacccgcacaccatttagcattccagatggcggagttctggaagggaaagctcttctttccaaacccctctcctgcctttcatcagagaaaattgtgcagttcttgaagatctcaataaatactgaaggcaaaaataatgtcaatgttagcaccatcagaggtgatgggatttttttttcttccagtgaaaatagaccagcggcatctgtaccgatgattttatagacttttctgccaagagaatgaggatcttgccagcttttcctaaaagaatcagaagtttcacgaaactcctagagttctacaaactgtttgctaatctgatgacagttggtttccttgcagagctctctgctaagcactagccagtctccacatctgcgtggctgggaggcctgcctgtgagtgccagtaatggaaagactggagagaacaagcccaactgtgcgtgtatatgtgtgtatgtgcgtgtgcattcgcatgtgtgtatatgtgtgtgtgcattcacgtgtgtatgtgcctgtacatttgcgtgtgtatgtgcgtgtgcgtgtgcattcgtgtgtgtgcatttgcgtgtatatgtgcgtgtgtgtgcattcgcgtgtgtgtatatgtgtgtgcattcgtgtgtgcatttgtgtatgtgtgcattcgcgtgtatgtgcatgtgcattcgcgtgtgtgcattcatgtgtgtgcatgagcacgtgtgtgcatgtgtgtatctgagtgcacattctcgtgtgcattcgcgtgtgtgcattcgcgtgtatgtgcgtgtgcatttgtgtgtgcatgtgtgtatgtgcgtgtgcattcccgtgtgtgtgccttcgtgcgtgtgtgtgcatatgtgtatatgtgcgtgtgcattcgcgcgtgtgtgtgtgcatgtgtgcatgtccacttgcatgcatgtgtggtcatgtgtgcagggtttgttaggttttgtgctagggattgtgcatgtacaggacggagagtgattaacttgctatcagatcctctcgagtcaggttaaagcttcccctccaaaccaacccccgccccccgacccagcaactctgctcccccgactagcaaggtgttttttcatcgtgatcatcacccctgtgttcagcttgggcggtgcccttgctggaagtctctgctccgaagatttccaaggacggtggcaggtgattgattaggcgacctccccgcacgccctggccagtccctcagacttcactggcaacactgaagtgcgtgttcggtgtccactgaagcaaccacaccctttccagaaagctgcagaggtgccctcctctcccgctccacagcctattgtcccgtttttatttctgacaccagacatcatccactggactgagctggacagtgtctgctcttcccctttccctgttgggataacttgttcaggggagtttcttacacaacctcgtctcccttgtcagtgaccgtctgtactcggaggcagcgctgtgccgggaggaatgaaggtgtgtgaaatggacccaaaatgtggatgggcgcccccggggacccacagacactgcctcctcagccacagcctgggcgggacttgctgactcaggcaggagtttaatcagtaactttattttaattccataaaacgacccaagagttaatttaggagtagttttaagcacaaagaggaaatttatctaaaaatagatttgacaaaatgtaaaacaggctagggtttcctctctgctaaacaaatgcgtgtaagttttttaaattcccaagtaaatgattcggaaattccttctgccttaagtctgatcaaagggaagtcttgacagattgcatttatcacagggagcaccacctgatgaagcaaaaatttattttaaaaaaccagaaatgtggtccgcggactacaattacaatgtgtctagggcatagaaaatatttccactaaaaggacttagcctaccttagaccacaggggagcctgggggcttttgggtttgggttttttagtattcaggtcctttctcagcaggaaatgaagtcacattccttaagcacaagcattaaccttgtactaacttagatattattatgacttcataataagtcgtaagtgcaggagtctcgggtacagatgagcaaccctaggctggaggaagctggcccagtggggtggacaggatcacaggaccccgccgacagcccaggtctcccctacagcagcctctgagcttctgcagggcctcccctaagctgggctcataggggtcaatgttaggggtgacgtcgtgaccagaaacacccttcttccacgggtttgtctttccaccaccattaaattgagcaataccatgcaaatagctgccagatcaagggaatttctccagctggggtctttgtctttctccctcctcccaccttcctcctccctcctctctccccattgtgtcctcctcccaccgacacccaccacccagtgcctcaaggaacttccttctgaatgatggtttattaagcacttctggaatagctgtcaatctgataatgataagaacagcagcaaacacattcagggtcttcacgtgccctgccctgacagcagcactaactcttggtcccctggaccgcactctgggcaggacacctgcttctcggccgccttccggaagcactgggacacaggctggagtcctccagggactcgcagcatctctgcagctccggagccttcacagagcccaggctccctgactcgggcccacgctataaccatgtgcatgccgcctctcccgctcagagagcttccgccagtgcccccaacttagagtcgttcctcaatctgagagctgttaaggaatcaattcatcttttaaattatatttttgattgttttttctgataacacaagtaacataatgcagaaaaatttcacacacaggagtgtgcaacccagcaggggaaacgtccctgtcatctcagctgcttagagagaggcaccgctagttaggtggtcctccttcaagatcttctcctttgtagaaagtgaaaaacacacatgtatcctgtattttattctttcaaaccgaaagccccactggacctgccttcgcagctccctcctcgccttccctgtgtgtcttgggaggataccatgttccactttggatgaatttctcctatctgtgggtagctgtgactgactcacaccagccctattgccactggacactggtgacaagtctaagtaacgcagttgggcagggacattgtttggtgaggtgatgtggaatcaggctgggacagtggttggtgaggtgatgtggaatcgggctgggacagtggttggtgaggtgatgtggaattgggctgggacagtggttggtgaggtgatgtggattccggaggggacagtggttggtgaagtgatgtggaatcaggctgggacagtggttggtgaggtgatgtggaatcgggctgggacagtggttggtgaggtgatgtggaattgggctgggacagtggttggtgaggtgatgtggattccggcggggacagtggttggtgaagtgatgtggaatcaggctgggacagtggttggtgaggtgatgtggaatcgggctgggacagtggttggtgaggtgatgtggaattgggctgggacagtggttggtgaggtgatgtggattccggcggggacagtggttggtgaagtgatgtggaatcaggctgggacagtggttggtgaggtgatgtggaattggcctgggacattgtttggtgaagtgatgtggaatcaggctgggacagtgattggtgaggtgatgtggaatagggctgggacactggttggtgaggtgatgtggaattgggctgggacattgtttggtgaggtgatgtggaatagggctgggacagtggttggtgaggtgatgtggaattgagctgggacggtggttggtgaggtgatgtggtataaggctgggacagtggttggtgaggtgatgtggaattgagctgggacggtggttggtgaggtgatgtggaatcaggctgggacactggttggtgaggtgatgtggaatcaggctgggacggtggctggtgaggtgatgtggattcgggtggggacactggttggtgaggtgatgtggtcatccggcagggacggtgagttggtgaggtgatgtggattctgacagggacagtggtttctgaggtgatgtggattcgggtggggacactggttggtgaggtgatgtggtcatccagtggggacagtggttggtgaggtgatgtggaattgggctgggataatgtttgggtgagctgatgtgtaattgggcggggacagtggttaggtgagatggtgtggtcatcaggctgggaccctctgctgtgactgagacccgtgtgtattgtcactcccgggaggcttcccggaggtggtgacattgtgtgtgatcagcatgtgttagtaagtttggtgcattcaaagaccaactctgagtccattgcctcagccccagggtagcccaggtgatgccaggagggaggggctacagggtttgcagttctgggttggaaaggccgaggccaaggaaggagtgtggacccaatcggctgcccacttagtgtccccgcccaagcattcactgtctttactgaagagcctcctggagcaggtctgctgcatgtctctgttcctgttcggagtgctctgagcgttggacctgagctttggaggacggggggagtttctccaggtggacctggcagaatgagaggagggcggggacaactcaaagaccaccccccacccaccgaccagggagagtgtccacctctcctcacaatggacttgctgcgagtcctcattggggagtttggtgatggcatagccttcctgaaggagacaagggaaagtggccttaggttttccagagtctgtgaggtttcagggaaaagccaggtccaagcagaggcatttctggagctgccgggaggggcatgtcctgagaggggcacacttgggggccacagccttgcagaccccccgccccagggctgagccctctagactttccagaggcccagcccttcctgggtcgagatgaactcacagaatgattttagcatttggtaccttttccttttccttctgagagtgatgccacctctcacagctcccggaagtgcatggccaccgagtccctccccacccctcggccagcagggacatgatttaccgctagatttggtctccagaagccccttcacactgactctgccctgagacttccaaatactgggttgtgaccaatcccaggactcggggaagcaagagcagtaagaattcagtgtgtgtgtgcaagtgtgtgtatgtgcgtgtgcatatgtgtgtgtatgtatttgtgtggatgtgtgtgtgcaagtggatgtgtgtatgtgtgtgtatttttgtgtgtgcatgtgcatatgtgtgtgtatttgtgtggatgtgtgtgtgcaagtggatgtgtggatgtgtgtgtgcgtgtgcatgtgtgtctgtgtgtatgtgtgtgcatgtgtagtgtgtgtgcatacgttatagatgtagatattagggacatatatgtacagtcacacttcacttaatgacagggacatactctgagaaatgcgtcagcagctgatttcatcaccgtacaaacatcagagtgaactgatgcaaacctacatggtccagccttctgcacccctcggcttcatggtagagcctgttgctccaggcggcaaacctgtccatcctgtgactggactgggtactgcagacagcagtaacaatggtatttatggagctaaacaaatctaaacacagaaaagggacagtaaaaatacagcattctgatcccacgggcccaccaccgtgtctatggtctgtcactggtggagacgtccttacgcagcacatgactgtgtatcgcacacctgtctatgtgtgtatgtgtatatatgcatgtatgtttgagtccttaaaataaactagcacccatgacagcctactgagcacttttgtgtattatcggaatctgcaaagaaataaacccttgctgtttttgccaaggacgtaaaattcttcaccttgtcttagagcaaggaaatttccagacattaggtaaaaccaggtccaatgaggggtaaagatgtgtgtgtgtatgtgtgtgtctgtgtgtatgcatgtgtgtgtctgtgtgtgtctgtatgtatgtgtgtatgtatgtgtgtctgcatgtatgtgtttatatgtgtctgtatatgtttgtgtgtatgtctatgtatgtatgtgtgtatgtgtgtgtatgtatgtgtgtgtatgtgtgtgtctgtatgtgtgtctttgtgtgtgtgtgtgtgtctgtgtgtgtgtgtatgtaacttgtttttatatttgttttcatcacctatgtgctcaacttgaatcaaggaatttatcagaggaatatttattatttccaaaggcatcaaggtattttatttttgttctggttaacatcttcttaaagagatctgtttgaaatagatagactgacataagactaatctccctttaggcttaaaagagaaaggatgagaaaaagtcctggcctcttaaatcacgtgaatttgcttttactgtgggcacattttgtgccacgtttcctaataagcatttattaattggaccaggaaattttctcagatctgtgtccgtgcgagcaaatccccaggcacggaagtgtgatggggcaggggcaagtttataacaactttataccattgcaaaagcacatctgtgtgccatatgactccatttgcggctactcatacacatttctgcagcaattgatcagaaacattgatttagattctattttaatactctgttttctactagcaagcaagcttttttgttttttgttttttgtttttttttttgcaaatgctagataggacctcagaaatgcccgtgtggatattggtcaaaagttagcacattttcctgaaagccttgaagctagttgtgtgaggaggtttatgaaaggagaatttttttccagttatccaattaaaatgatccatgagctcagccagccccgggatggagaggagggagaatgccagctgggtctcgaatggctattttgggatctacggggactctgttaactgatcaccggctcacctggtcacagctcagcctggtgacaatcagagaggccagtcactttcaaggcacaccacagtatatcagatgcttccctgtgatgaaggcgggtacgagcagtcactccaggcctgtccctgatgctttcctgtgatgaaggccagtgcagggggccacgtcgggcctgttcctgggctgtgctgcctcctggtctcctttcacaggcagattctgtggactgcctgctctgctccaatgctgtgctggaaatgtgggggaggcctggggagtgtgtaaggggagcggctttagcttgacttctgatgaaactgcataggatctttgagcaaaggtaattctgtgggtggggcagcgagcagatgaccacgtgtgggcttgagtccccaaggccgaaggcactggtcatgcttggcctctgccactcagcacctgctccacagtgcctgctgcccagcccacctgcctcctctgccctgcgtccgctccactgcagccttttagagcgtggatcactctctagaattgtgtttatttatttccttggaattttcagccttcctgagctacagcgttagagggcaaaggcctggtctcatccacctgggcatccccagcacctagagcccaacaacaggcagaagtggagcatgcatggaatcgaacaatcatgccccccataattgtatgaggcaggacttggtgctatttatcagaaacgaattgtcactcacagctccaagtcaccttcctactgaaaacgcttctcagacactctttctttcttttttttttttttttttttttttttgagacagagtcttgctctgttgcccaggctggagtgcagtggtgcaaacttggctcagtgcaacctccacctcccaggttcaagcgagtctcctgcctcagcctcccgagtaggtgggattacaggtgcccgccatgacacccagctaatttcttgtatttttagtggagacagggttttgccatgttggccaggttggtcttgaactcctgacctcaggagatccactctcctcagctatgatcacaggtgtgagccaccatgcccagacccagacactcataaaggcaccgtttcctaaacgtgcagggtgtcgggaagaggcgcaggtagagtgggaaggaggaagccacactgacttgcctggcattctttatggaccaggcactgctgtttctactccctcctttacggaggagctacaggcactggttctgcatcaacactgctggactgtgccccttcccaggcttgaggcggaggagaaaatcacttcgcagggtggtcaaggtgcagctttcaagatgaccctttgactgagggaaatgaggaggtaaacatatctttaaatcatccttgccagataaaatgtgaatttggatttcaaactggaaaagagaatgctttctcggatggaggctgtgcaccttggggatgccagggctcacccaagataatgagcacacttggaggaaggctgaactggggttctgggatagaagtaaaaactcctaaaaacaggcacctccaggaggaggggctgccagccccacagttggacacaggggtgtgagggtaccttagatttccagtctcctgcgtgctttagagatgagaagccactcctgtctcctggcaccgtgaagaggagattagcaggcggttttctcctctgcacgggagccaccttcacaagcctgctctgccgagcgctggcgatacgcggcagatagtgctgacagaagccgaagtgaaatgtcatagcttcagatcccgtgcgccgccggagagctggaatgaggcctgttgtgccttcagagactaacagctaaatccttcattctttcagctcccagcatatggcatgaagtagggagtgaaagatagatttctttggataggtgcagaaaatatgtgcaacgttttcactgcctggctgcatagaaggatcaaaacagccatgttttctgagagcagaatttgaatgctttgaagccgtgcctccagattggtaatgttgattcagaattaatacctacttagagtaattagcaacttatgcagtaggcacagaggtcaccgaacaaggagaggattaactgaagacacataccctgcctctgccggaggttacaggccagttgcccgcagaggcgtcctgcccgggaggcatgaaccagcttcatttcattcttcttgctggccctgctgctgtgggtatcagatgtattccacggggccctgcaaactcacaccatcagacccgaacgagggtctgaactgtcctggagctcaggttgctcaggagaaactgagtacagtctaggggtgcccagcaagcccctttccatggtgcctctcatccttgagcctgagatcaccacagagagggcatgtctcgctctgggtctagccacagaggaatccgaggtctgccatcagctcgggaccttgtgaggttccacatggcggtgcttttgtgctggggacaacaggagagagcagtgaacccctggatcctccagcacgtcccacaggggaggtcaaaaatgcagggaggcagtcacagtgtctgagagaggagcttcgacttggaaaatggtgagccctggcatctcatctagctggggacgctcggttccctcggaatttgcaccaacctccttcgtccaatccttcccctctctgcagttggactgctgagctgggctttgccccagtgacttggccgccacactgagctacacagcaggaaaggatgcagctcctcctgtggggtctccaggcccggcctcacccacccgctgccaggcctcaggcacccgaccagccccctccatgaggctcctcttccatgaggcccctcctcctccaggccctggttctgccagctgggctgcacctcctagcctacaggtctgtcccacctgcgtttcctgagcccctcttgcaagcctcacatccatgtcagcacagagacagatctaaagaggaaggggccatgtctgtgccaggctggattgtgggcccctcccacacatgccttggtctaccaaccaggtatgcttgaaggaagcagaaggaaagaatgagaaccgccccccacaaaccaacaaggccgactcgggcacagaaggaagctccgaggcctttacagggctgagccaggggcagggcctggggcccagatgtccagtacctcagggactctttctcctgggcgcaggaggaactgggaggcaggtgcagcacccctggtgagacttgggctgaggatgctagagaggggcgggaatggatgtgaaagtgtggtcaagactagcactggctgagcgccagctgtgtactgagcaccagctgtgtactgagcgccagctgtgtacagcagagctcactcctccacaacatggtccttaagacgggaccggggctgagatcccagcaggccagtgcctgggtcagggagggcaggagctgaggcttgagggggtactctggcccaagtccaccctctgacccactaccctccatggtccatggggctgccctggcccagggctctagaacatactaccagggaggtggcagaggagagtgggctgaatggaggcccccaaaacatacatccatgtcctcacccccagaacccatgaataggacattacttggaaaaagagtgtttgaagatgtgatggaattaagaatcgcaagatgagatcatcctgggtgatctaggcgcaccctaaatccaatggcaggggtccttacgagagacgcacagaatgcagttggggaaaagagagtaaggccgcaagaagacagaggccgagactggactaatgcagccacaagtaaggaatgtccggagctcccaggggctggaagaggctggaagggccctcccctagagccttcggagggagcatggccctgcacacaccttgatctcagacttctgaaatcaagaatgtgttgcagcagccccgggaagctaacataggaggccccaattgcaaacattcggatgtgcggatgaaggatcctaggggttcctggggcctgagaatgaggacgaaagatggaaaggatggaagatgctgatgagaagcccagttcatagggcccacacccaggcgagtctggatccttaggaaaagaacatcagatggcacagaaataagacagaaggccgggcacagtggctcacgcctgtaataccagcactttgggaggctgaggcgggtggatcacaaggtcaagagttcaagactagcctggccaacatggtaaaaccccgtctctactaagaatacaaaaattagctgagcgtggtggtggacacttgtaatgccagctactcgggaggctgaggaaggagaatcgcttgaacccaggaggcggaggttgcagtgagccgagatcacgccactgcactccagcctgggcgacagagcaagactccatctcggggcggggggaacaaaaaaaaggaaatccctaaccctgctctcatcacagctccctgtgttccagaacccagcagggttcccgactgcaaaccactgaaatctaaactcatgggccctccctggaggtgtatctccccggagggacgtctccccagaggggtgtccatctccggatcccccagggctgtctcctctgtccgagaagtgctgctcctgctccaggctggaaggtcctcacctgtccacctgcccaggagacgcttctacccattcccacacccgggtctctcaaccctcccatctgtttcttctcttttgcggagtaagtgcctccctgcagagccagggctgggcagcagaagtcagagatggagccaggagaagagggttctggcctggccggccattccttggctgttttgctcaggctcatcactgagctggcaccatcttgggcctgtctcacactgccacactgcccgagacagcagccattagccgcacgttgctggacagcacagacctggcacgtgtcgtccaccctcggaggggtccccttgcacgggctccactccggacggtccctgagactctcccgccctcacgcctgctctctaagccaagcacaaagccaagtgcagcccccactgaccattccagcccatgccggcgtctgccccaggccccagatccgtcctgctggtgcgattgagggcacagagtcgagccttcaagtaggtcttctaatatggctccattcatgcagaaacctcccagtggggctgtgccaggcacttggaaagtgggagccgcagccctgccgtccgggtgcttcccattcaggggaagcaagtcagaaaccaaggcaaggagctcattcccggggctggtgactgcaggtgcccgcagagggcacgggggacgtgcccttggtcaggcggtcagcagcaaaggcctctcccaggaaggcacctgagctgggactggtgggcttgcaattgtgtcctggagtgggtctaggagaatacgctagagcctgtctccagccttggtgctgccgacatgtggggccagagtctcagctgtggggcgtgcactgtggggtgctcagcagatccctggtccccacccagtagacccccccgcagtgtgacaaccaaggagatctccagacattgagaacctctgggggtcactgctggaaggaaggaacccgagcttggatgtgcttagccttttgtgtccgcctgatgtcgggctgccttggggcatggggctgagagttcggagtgtgttaaaccagtaactgactgagggcagcttgataagctactcacttcgcatatgcaaggatatccccacctttggtggttgcatcccgttacagattcacccactttatgctacacaagaatggccgctggcaggtccccacagtggctggtcatgtggaacgtgtttacagtgtctttatctggagaaagatgacttttctgttctcattacagcctcggccatggacatgatttgttagaaccttactatgaagtgtgtggtggcgcacaggcgctctgaccttctccgtatccctgcatttaattagctggtcatcctgtccttcggtaaaggtcacggtggctgtaaatgcatttggggggatgctggccagcatgcggcctggctgatgagggggcagagaggcagggtctgtggtgctcacacctcgaacgcccccagtcatcacaagcccccccagtgcagggcgggcactggggctccctgggctagtgacagggccacggttgccaggtcagcgggcacagccagctgcccctctccacagctctgcccaggagcactgttcaccgtgggtaagcaaccccaagtggctaattaggatatgtggcagcagcactttctggctctccgagttgttgtccactcgagaaagtgttattttcaacagattgcttctcacacagcttcctgccaagtcatgtccccaggctggatgacatcaccccactcaacctttctcgagcctgtgtagttgtttcgtggaggtcactgtgtcgttagcgtcaaaaggaaaacagagctgaagacaaattagaggggaagaaagagtctgagcgggagcaggcctgctgctgggggctttcaccgcggacccggggctttcaccgctgacccggggctttcaccgctgacccggggcacacacatgtcgtgaccagcctgtaagaacatcttcacttccaagggctcagctgcatgggctggcaatggctgagtgagtacaaaccaaacagtgaggccaggggtttccactgttggggggccccatgtcaagcccaggaagtgtcaaaatgtgagcaggtggctgctgaggaacgaggctcacagcgccggagctgcaggtatccgtgcaggcgtgcactcggaacaccccacccccggggacaaggaagggggcctctggtcagaggatgtggtggcttcccttctcctggtgcctcaaaggtcccagagggtggaatgcgccatgtcctgtccccttcactccagccgtgagctctgcctgctcttgccttcaaagactgattcacagtgagggaggcccagttctgcccacagacatacattccctagatctgcacgtcaggggagcgctcagcatcgacagggaagacagttttttcactgtcagccgttctgactggccgggtaggaaatatgcctgcgtggctggtcacgtctcctgcatctgggatatattcttggtctgtccttgggcttatattagactcttggggtcaggccttccttgaaaaacgtgtggatcagaaacttggtctttctttactccagcgcatgacagaagttccttggtagcacgtcagcccagagggcaggaacccagagaggtctcagggttgtcaccccagcaagggacccgctgtgtcatcagcctccgtgcatgcctggtcagtgaaagaatgtcaccccgtacggcctcactgtggggccacacatcaccccatacagcctcactgtggggccacacgtcaccccatacggcctccctgtggggccacacatcaccctatacggcctcactgtggggccatgtctgtcttcatgggtgtcttcttcatgtcttcttcatgtctgtcttcatggcccaggcctggggcagagccggggttgccggctcagcgggtgagtgccacatgagtcttgccttcaaagctggagtgcctgatcttgacagcggaccgacatcttcaagggaacggcggctccccccttttttgcagaacactttcaaaggtgtattcgtgttccagggccgccataacagagcgccacagaggggcggtgtaaacagcagaggtgtatgctctcgctgctctggaggatggaagcttaaagccgaggcatcggcaggggtggtttgacgaaagccgtcagagagctcggagggaagactctgttccaggcctctctcctcggcttgcaggtgccatcttcttcccgcatctcttcacatcgccttccctctgggagtgtgtctgtgcccaagtctccagttttctaagaacagcagacatacaggattgggacccaccttactccaatatgacctcatcgcaactaatttcatgtgccatgaccccatttccaaacaaagtcacattatgagatgctggggtggaatttcaatgtatgaattgcaggggacagaattgaacccataacaagcgagtgaatggatgtcagggtcgtggctgtgagattccccacgggtgagtgagttccatgcatccagggctggtggacatctgggcttgtccacataggtgggtttggaggtttgggtgcagctggcagtgccatggcctccaagcgatcaggacatgcccatcctcactgggtggggaccagccctgtgggcttcgggtcctcatgggagtggcgtgtgccatggggtgccttccagccagcacagcgggtctacggatcagttgggggtggattgcaaaccaaagcaagagcaagaaggaacggactcaccaggcaggcctccagcgctggtagcttaggagctgcagttcctggaacctcggttcggctcacgcggggatctccccttctcagggttgaccttgttcttaatgattcggacaaagcgtccattggcaaaacatttccagatttgggatatccaggtgagcccagaatggagttttcttcagtccaaaaaagactgctttcgagtgggacaagtttgaccttatcacagaagcatgggtgtgactcaggccgaagagaagttcactcagctgcgtgaagcctcgtcctcctccttcgtcagctgattagctggcagccgggaggaagagcctagacctcacggaggtcttgataaagcccctcttcaccgaagtgcagtcaagtctgcaagacagaaattggacaatgggaagaaagcgtcttcttcactgccatttcccggtcccttcagctctgttgagtggttctcatgctgagagttggccgagaagcaataaaacacggtcctctgccactttctccataaagcccagctggccgcctcataggaccatttctgacaaactgggttttgctgagaaccacacaaagacggcaaaataagactggcttgtaattgcccatttctcgatccttgtggaatcgggggcccaggatgggaccgaacaaaggtgtgtgcagagttagacgaggcaggagccacgtaatgggtccctctgtcctccaggaacgctccacacaaaacattgctctgtaaaaagacgacaagggccaccctcccaaacgcagcccaagtcactagcctaggtgcagacgcttcgcactgtgtgttgttacggtccttgcaggcattctggtgatgcaattcattcttctgaagcgtatgaaagctgagtgcgaccttgagccagagccgtcaaagttgaagcaaggtaaagcggttgcttgtaattacacactttttaatttatctgtgtatgcatcttaaaatcacaaaaactttgtttgtacttgagctgcagattcaaaagtgcttagtaaatccaattacaggcaatgtcacctgtagaaaaagcacagggcatttctgtctagtttatcgtgttatttttttccaaagtactttgaaggattttgcaattaatctgctgttccatttgattgaaatttagagttcttgatctacatctgtcaccttcctgcaaagcaaatcaggcctggtgtgtgacaacccgctttttacgtgtgggaggtcttgccaggcgtgtgctcagctggcagaggctgtgtgcgtgcggccctgagggtgtgaagacttcctcaacaagcctttcttcatctcactctgcgtgccgtggtcagtgccatgttttcgggtagagcaatgaacataaaggatgtcatccctcttggctgaatttacactctggtggggcagggggccacgggatgttagaaatgcggcagagaccaagctgtgatcagaagtgggggctcttggacgagctcagaacacacaggccttgggttgtttgtcttttcctgacttctatgtgcagtggatttcctgctttgtggcagaggctgctctgagcacagagacctgagcatcatgaggcattcatcctagtttaaggagacgggcagtacacaccacgagtgtcatggagaaaataggcctggcaggatggacacagttgatactcgagcgtgaatggagacactggcagcaggggcatttcataaggaggggacagtgtggctgggatatgggcggccttgcatttgcagagtatttaacctaatattgaaaagacatcatttgtccccaccaacaaattagtggggaaggaaggagtgaggtcaggtgtggggatcaaagctcctcgtccccagcttgtgtcccttccccgtcgcacctcttccccgtgcctggatgaatctgcaaagagagcggggatctgatgtgtgcagccatctcattggccatacaagagctgtccatgtctcatctgggccctggtgatgaggtggctccactcggggcagggttgaggctttctgtgtctgcatcagaccctgtgcactattcagcctccctcccctgactgtgtccttttcattttaattttaagcacatgggatttaaacaatatttactcagagctgctttaccttgtattttcatttggaaatattaattgtgacctttcagaactcccaattaaatttttccaataaaatgaaaaggttgagctggagcagaggcaggggtgtggttgggatgagggtggcagagtcacagccgctgggagtggccgggcaggtggctgtgccctgtgggtccctggctcgagccaggcctcgagcgctcttggctgagcctggaagaagcagcagaattccccgtcttggggtcgggcaccagtggctgaaacgcatttccatgggggtcaggacagtcctcggcatctccagcacctgaagttgcagtgtttgagaagtgcagacgggacaggatccctggttctctctgtgttgtctcaaggtgctgcgaggaaggcatcagctcacaggaaacccagctccttcccaagcagaagtagtggcagcactgcctccccactctgacattctcagaatgggcttttgcagtggagaaccaatgcaggtgctgatccaggtcactcgggaggaaggaggccccaggtcaggcagccttgtggggcgctctcgttaaagctggaacctgctctgggtgctgtgccacctttcagcccaagtcaagttttctggaggcctggctggcgccgccttctgagagaggagagcggctggccctgaagcccccagagccaggttgcttggcaggggtggtgggatccggtggccacagcgtgcagtaggagttggggtgtcgtctcagtgggtagagtcactctcacccctggtgtccacagagcttttgagttttcaagataagccaaacatctgggcttttttaaaatatggaatttgccaatatctaatctctacggtgtcagccgggatgtctgagtcttggcatggtcatcatcatgggcattaaatggggtggcgccgctctgggcaccacaggcatttagcagcatctctggcatccactcaggagatgccagtagcaccacccccagctgtgactacaggaatgtctccagatactgccaagtgtctcctagggccaaatgcacccagattccagaaccagggatatagagtatgggctgtcattttgtgaattctctaatagtccaaccaaaggacccgggtgtgagctaatggccagctggacccaggaacgcgttggggctcaaaggtcccctgagcacacagtccttctgcacccagccagctgctgcttcccatccgctttgtctcgttggcatgtccctctttaggacacaggggccttgtgcctagacctagcagacttcctgcaaaccccactcactcacaaacttcagggaatatttgttctcaccttggtggaggcatccgcacctgagctaactcaagaccccaggtggggctgttttacgaatcccatgaaatgaacagaatgtcaccctgctgcctgtcccggccaggccccttccacctggcgggggagatggtgtacaacagccgatctgggggaccagaccccgggggttccacaccgcagagggagcacgttcagcccttcatctctggcttctgcgtttggtttatgtgctcaaatattgctcactgggtctaacccctcagtgtgggagagccgtaggtgccccagtggccatcttcacagtgtctttcaatctcagagtcctcggcccatggccattcatgcaagcagcagctggtccgttcctgccacttccaaggacgctctgtcaggagagccaccctcatgggacttcctctggcccttgtagttctgggtgggagcgtgtagaaaagggggactcattgcagcttggcctggaggccccctcacccaagctgcatatccctggaagctggcagctggcttcctctcacgacagctttgagtgtgagcccagtgatgttttaaatgtggtggatgcctgcagaatcgccgacaggctccatttgcaaggggctggccgggctcttctgcacacatttgtgtcaacagtgaaaaattacatcactagcagacaaatcaaataccccagttgtgtcaagatttcccagatgtgatgtgctgagctcggagccccttgtaaattccacgccgcttccttctcttaaaggcgcctgtggatttctcccccacgggtgctggcttggactggacttgggatctgaaagccctgttcttcccttccagacagagagcaagccgtcccaccccattgtgcccagtggctttagcccatgaaactgggtgaggctggctgaggaacagccggcccgacgcctgcccggcgcctgctcggcaactgttctctgtaaaacttttccagctgcgttgctcccagctttcccgtgaggcccaggaccctgtctcagagggtctgggcagctttcccctaagcgacttgggcacagcaggctttggggctgtgtgtttactaaagggggcttcagagggccgggggggatgagagaccggataccccacccaggactccaaccaccacccgaggcaccgacaactgacagaaaactgcagccggcctcatttgccgcagacccccttctctcaacaataacatgtggggcacggtcttaacaaacatgatgagagaaaaggctgtagccaaaggcagctgttcaggaacggagaaagtttagctacgacgaagactccggggaggaagaacggatggaaaggccagcccaaatggaagttggagtttgctgagctgaggacagggcctgtgggatctgctggaagagaggcgaaccaagaccaaagggatcggtttctcccgagctgcacacagtggcaccgactccctgatccccgatgtgtagaaaccaccttggctgaattctcccgagcccgctgcaggccagtgggaacagtggttgggaatctcaccggaactggctcgggcaggacgttcatggtgaggttccaaccggaatgagtcatgtgaccgtcagcatccgacctccacattagccgcatgaccctctgtgatgcccagaccagctgagatgcaatccccgcagagggctgaagagaggcgtctgtggcacgtggtgggggccctggtctttagaagctcctggattctgattgccttcagctgggctttcaggtgggtctgcctgcaagcaatctcaaaggcaacactgttctggaagcttccgtggcggtactctctctccatcttccctgggataaaacaggaagctgaggccagtcccttacacaggcatgagctgtcatccatgtctggacagagtgccggggtccccatgagcgcatggcggggatgccagccctgctgctgagccagtggtcctgagctccctgaggacagcacccgctttgtcttcccacctggtgcccaggagcctggcatggtcctatgcatggaggccctctgtccacatttatgggacaaggaaaggcccaactctgccttcgtcagttgctgcctgcagtgtgtgctttgcgcggcttggacagtaaaggaaacctgggcctgttatacagggaaaggacatcttaaaccaaggccttcagcccaccaggcagccccactggctatgtcctccctggcaccctggggtgctgggtgaacgcgggatgtggacacgtgtgagtgccgtgtaatccttacctgcctagagctcacagcatcctgccctggtgcatagtgaaaatgttaccccataaaaaaggggaaaggatgcaaagatcaataaaaacaaatccttcacaaccgtggtccccaaactttttggcaccagggaccacgtttgtggaagataatgaagacaatttttccatggaccatgagtaggggggacggttttgagataaaactgtcccacctcggatcatcaggtgttagagtctcatgaggaacgcgcagcctagatcccgtgcacgtgcagttcacaacagggttcatgatcgtgagactctggtgtccttgctaatctgacaggaggcggaggacctgccaggaggctcttcctgtgtcctgatctcagctcgggaatgtgtctggtgtgtttgtttccacgttatgcctgcggatgacagggagggtcatggtgtgaaatctggcttaggaaggcggccaccaggctttggagggagagacagtggagtttgcatccaccagtgctgaggagaggaggcagcccagctggctgtgccctggacccaggacctgggctctgctgggggtcccgggctgtggcgcgtctccctgggcatagccatcacccagcacagcagtggtttcaggcaacagcccgggaggaaaacctaggaagaagggctggtgctgcccgcaagtgcctggacctgcacacacacacagggctgagtgtagcgtggccagcagggggttgacttttaccccgaaccagatgtaccaagcaccccgctgactcagactccccgccccccgcctacccccagcagcttggtcccctctgcctcctaactgggttggggcaccaccctccactctccacgttggctgcctcagtctgggtcacagacacaggcttcccagccagggcgactgcagcatccacctcctgccacagtcagggggctatggagaaacccaatccaggccccgggctcccagtttgacacccggccacacagccctgactcgtagccggtggctgcaggctctttgccccccacttccccagccctgctccctccagcctcatgccccttgtagaccctctccaccctcctgtgcctggagcccctcccagacgtttgcaccccaccccttcccatccttggggctcagagaaatgctgccttctccggggaggccccatcctccccagcctcacatgaggcggcgctgcctctgcggaggccccttctctgagtgtgcatcatggacgggcatctcctctgcaggctgtttgttagagatgagcacagaaatcaatagtgggcattggcagacgtgcagaacaccccgcgtgcaatcttttcctggtaatttagttctatcgtattttacaaagtatcagcttgtgacagagattggacattagaaaacaaaaggctgttccttcagccagacggacgggcagcagacctgctcagccctgccttccccgaaggacctcaggctacacgggcagtggggctgcggcccagctcaggcctggctcatgatgggagtgtggaggacactggctgagttcacatcaccccaaagcctcgggtcccagtggcgtagcggccgcccaaatgatgagcccacaacgcacctgcccctctctccaggggagtgcaagcaaatgcaggaaactggggccaggctgggccactgtcaggggttttgctgtccacaaatttaatcaagacagctgtcagcaaaagtcagacttatttatttatttattttctgagagcgtcttgctctgttgcccaggctgtagtgcagtggggtgatcttggctcactgcaacctccgcctcctgggttcaagcaattctcctgcctcagccacccaagtagttgggattacaggcgggtgccaccatgcccggctatttttttctatttttaggagggacggggtttcaccatgttggccaggctggtctcgaacccctggcctcaagtcatccgactgccttagcctcccaaaatgctgggattacaggcatgagccactgtgcctggcaatttttgaatgacaatttttttttttttatcgctggctaatcacagagtgagcagaggtgcatggcagagaaggtagcatggtttccagagtaaaggagggcaaatggcacccataaatggaagcaatattggtgatgctccactctacacacttgccacgtcccctggtcctcacgaagcccaaaatagcaggatggagcgggaggtagaggttctttcttcttgttttcccacagatggcacaagctaattattctcatttgtgtagcaccttacacctctgtagatgtttttcagaatgttggaaaacagatgatcacgtctgtttttgtagccgtgtgagagtttttttcattagcgggatcgggcaagaccatctgtgtgttgtagggaaaagtttgccaccaacagcgagtttaaaactttgaaacagtaactgagtgggatgttcttcccctgtccgtgggcggccagggtgggcctggggaatgcagaatcctcaataaatggatccagaatgaaccgagaacctcaaagccctgccgggcgggtctgcatagccctaggcactatcacccccactagcctcaactcggtgttttttcccagcccagactaatgataaccaagtcagagaactttccagaaaaactggtggccagaagtccctctgctggcagctgcctgtgtgtcctcaaagaagtcagctcacctctctgagcctggtgtcctggctaagtggctgccgattggttctctgggccccaatgtgaaggcattgagtgcttgagtgtctatggatgaaggcggtacaggaactcccaagctgccaagcctcccagcctctatctgtgtgcaggccctgagtcctcgctcctgcggcagagcccccctcctggggagcttcagatgcacgttcccacttcagtccaccagctgcatcaccattgataattaaagcaatgtgcgttgatgaaaagggatttcatccagggaactccacagcccctgcctctggggccctggggctgcaaaggtgatggcctccagaagagctggagggccctggtgaggaaggggcaagggcccatgtggagcagggtgcaggcagagccacgttcatcctgacattctcagtgctgcagagacaaggtgagctgatgctgttccaggctaaagagaccagatgctcacttattcactcaacaaacactttctgaggccctacatgctcagccctgctcgaagtgccgagagaccatgcagtcctgaaagggggtccctgccctcatgaagcgcgcctgccggggagagtgcaccagattcctgtcactgctctaacaaatcgccatgagctcagtggcctgaacatcataggcatacgaccttacagttctcaaggtcagaagctgatatggtttggctgtgaccccacccaaaatctcatcttgaattataatccctctaatctccacgtgtccagagagagaccaggtggaggtaattggatcataggggcagttcccccactactattccagcgatagtgaatgagttctcaaccatgatattgagtgcgttctcatgaaacctgctggttttataaggggttcttcccccttcacccagcacttctccttcctgccttcttgtgaaggaggatgtgtttgcttccccttcgccttccgccatgattgtaagttttctgaggcctccccagccatgctgaactgtgagtcaattaaacctcttccctttacaaatcacccagtctcagatatttccatatagcgatgtgagaatggactaatacagaaggcttgcaggctagccaagtagttggcaggcctggctccttctggagactccagggcagaatcctgcctttcccaatcctggaggccacctgtgttccgactctgccttctaccctcaaagctagcagcacagcctctcccatctccctctgaccttccttcctccctcataaggacgctgtgaggacacagagcccacccagatcatctgggataatctcctgtctcaagatccttgacttaaacacacctgcaagtctcctttgcaatgtaaggtggcatagtcacaggtctgggattaggatttggacatctggggagggccgttattctgcctgccctgggggaagtgaaccatcacctactggcttgggtagcaccgtgtgcggggctgaaacatacaagatatagggtggagggtgaggacgggtggtggaggaaggtgtctctgaggaagtggtattccagctgcagggaggagggggccagccatggagacatctggggacagtcagtgcaagtgtcctggggtgtcatcagcatgacagatagctgtgcactgaggtgagttgctgggagcctgtgacagacactgccccactctgtgcaggaggggtccccagggggttgagcagccttggccaggagagagggaggctggagagaggcttggagggagactgggtcagccagacatggtggtgcagggacggagggtcttccacgtggatgatggaactgagaagccaggagaggctggtgaggctgagtggtccaaggggccgtctccaccaagccaagtaagctgtgtccagactttggacttgatccgtgtggtggagtcctgtgggccttggggcctccaggtggatgggaaggaagggtcagccatgagccctggaggcagtggggctctgtggtgggctgcctggccaaggtgggaggagaaccagctgatgagagagatggcagtcagggacagggtgtttggaaggtcacaccagctctggcagggccaacagtgttgatccagagaggacacttagccactgccctagaggggagaagggcaggatgggagtcctaggaagcagggcggaaggtgcatgggaaggtgccagccctgcccagctcctcctcttcttccctccccaacctctcctcccctcctttcttcctcctccccttctctccagcttaaagcctggatcaaataactgtggtgcaaaaaaccaatcctacaggcacatccctggccctataggggcacccactccaagggacagaccaaagtcagggtatgagtgcccagaaggcagcaggagccgtggcgagctggctgggaattcagaggggcagcccccatcacggaaggctccccatgcccagcctcatgctgggccctggttcagagctggccccatgccctgggcccatgcggtcccctgggcagcccaggagagtgaaagctctgactcgccgagggtggtgggaactcctcgttgacaggcaggaagtcagtttgtgaaatgttaatgtgctaatagagacaagcagtagaaactttgccaggacactggggatggccctgagactcgtgacttggcagttcagagcagaagagccacagctctagaaagcaggtcaagtgtccactgtcgttcactcatgtggccagttctggccccatcttcccatcttgacatttcagaagagccttatccctcctctctctgggcagatgtgcaaaatatgcaaaaataagtaaagatgcttttgaaatgtatctgcacatcctcacaaaatggactgcatctgtgtcctgacccctgcatgtcctccaggttcaaggtgcacatcctgtaccctttggagatgcactttgcaatgctgagcttcaaggtgcatggggtgtctccactcccccccagacctcctgcaaggagtgagctaagccatgggggtcccgtgcaagcagcccacctttcaaagatgcacagaaatgggtcctgtgtactctaagcgtggaactttgtttcttagctttgtttaaaggcactttggacacgtgttcgtggggaaatcttggaattcatcatgcttgtctgcaagggtctctgggatgctgagctccccaggacggagagccgtctcctctgcttatgtagcagcacagttaacggtggatgtgcaggtgtgaggggccaaagactcccccagaaaaggacagtctgtgctcccacgccagcgctgagtgaggccctggggcaagggctgccccccactgccctgctgtatcatatgagcctccgtttccccatgtgagcagcgagggagggggctccccatgggccgcagcaccacacctgcctttcgtgatacctcaaaatggaaagttagaaagcagcccctacgtggttactgagactactagaagcccatctgtggctttaccagtgacaccttctcatcaacaaggcgggtgtgggcatgggacccccatgctcagctttccccgtgcagtgggctgatcagatgtgtgttcaccccagcgggactcagcacatcagcctctatctgaatgggaaacatcactggaaacctgtcttagtccattgtctattctttttttattttattttattttattttattttattttattttatttgagatggagtctcactctgtcgcccaggctggagtgcagtggcgtgatcttggctcactacaagctctgcctcccaggttcacgccattctcctgcctcagcctcccaagtagctggaactacaggcatccgccaccacgcctggctaattttttgtatttttagtagagacggggtttcactgtgttagccaggatggtctccatctcctgacctcatgatccgcccgcctcagcttcccaaagtgctgggattacaggcgtgagccaccacgccgagaaccattgtctattctttaacagaacacctgggactgggtattcatgatattttattttttgttttatttaccttttcttatatatttttattccagtagccttagggatacaagtgtttttggtgacatggatgaattgtacagcggtgaagtctgagattgtcatgtagtggacattgtacccaataggtagtttttaatctctcgctaccctcccacactcccctcttctgggtcttcagtgtccattataccactctccatgactttgtgctccctagctcagctcccacttacaagtgaggacatggaatatttggttttccattcctgagttacttcacttagaataatggcctctagttccatccaagttgccacacaagatattgtttcattctttttatggctgagtagtatttcatgacacatatatatgctacattttccttatttactcattggctgatgggcacttgggttggtaacatgtctttgcaattgtgaattgtgctgtgataaacatacaagtgcagttgtctttttgatgcggtgacgtcttttccattgggtagatacccagtagagggactgctggatcaaatggtaaatcttctttttagttctttaagaaatctccatgctgttttccatagaggttgtattaatttacattcccatcagcaatgtgtgagcatttgctttcaccacatccacgccaacatctattgttttttgacgttttgataatggccattctgtctagggaaaggtaatatctctgtggttttcctttgcatttccctgatgattagtgatgctgagcattctttcctatatgtgttggtcatttgtatatcttcttctgagaagtgtctattcatgtcattggctcacttttgatgggattgttcctttttttcttgctgatttgagttctttgtaaattctgcatatgagtcctttgttggatgcagagtttgcaaatattttctcagacaaggtaatttatggagaaaagtgtatttgagtgacagttctggaggctgggaagtctaaggccatggctttggcacctggtgtgggccctcctgcttcctcataccatgagggaaggcatcacatggtgaccagagagctgactcttacaacaaagccactccttccataacaagcccactcccaagataacaacattaatccattcacgagggcagagccctgattaatccattcatgtgggtagaaggattaagtttccaactcaaacacattcaaaccacagcaccttttaaatttgcctctagggacagacataggtggctccctctggtctgagaccacccagctttgccggagtctggggacccctgagactgaaagccctgggatgtgactcaggtctcagagcaaggaggtcagcagcctcttggaagtcacagcaatgctcatctaacatgcagcttgccggcccaggtcccatgcactgggccaggcctgagggccatagcaggagccagcatttctaacatgctctcagcaggattggagagcccctgcgattgggtggccccctcagagaccccacctgatgccactttgcctgacaaagttccacagccccctctgggctttcttcggccagacatgcctggccacacttcaccgtggctccaggcagcagcagccccagtgccagctggggctctggaggtggcttcttttgctgtcactgtgctcggctggagctgtaaaggggcagatgctcctcacctgtgagccaccccttggctggagctgtaaaggggtagatgctcctcacctgtgagccgccccttggctggagctataaaggggcagatgctcctcacctgtgagccgccccttggctggagctataaagggacagatgctccttccctgtgagcctccccttggctggacctgtaaaggggtggacactcctcacccatgagctgcctcttggctggacctgtaaaggggtggacgctcctcgcctgtgagcctcctcttggctggagctgtaaaggggtggacgctcatcacctatgagctgcctcttgccctgagctggggctttgggggcaggacccagcaggaggaagtgtcccatcctcactggaggtctgagtgctgcttttcacctgtccacaggcacccactaaggtaatccccatgggcttgtctacagaatagtgcaggcttgtgtcccgcaaagaaagactcaccaaagcccttcgcttcatctaatagctgaggttggatcaagtgtggtgttcacacctgtaatcccagcactttgggaggccgaggcaggaggatcatctgaagtcaggagtttgagaccagcctggccaacatggtgaaaccccatctctactaaaaatacaaaaattagctaggtgtttggtgggtgcctgtaatcccagctactaaggaggctgaagcaggagaattgctcaaacctgggaggcagaggttgcagggagctgagatcccaccactgtactcgagcctgggcaacagagtgagcctctatctcaaaaaaataaataaataataaataaaatccaaggtccttgatgtataactgaccttgaggctgtggaatgtggttcttgggcaggcattcaccaggtagaggaaaccctctgcaccctcgtcatggcccactggctgccagtgccagcagcttcttcccatccctgctcctcagcatgctgggccatgagcagggcagggcgtcagggcagggtggcaggagcagctcctcctgcttggcagagatgagtaaagcactcaacatgcaccaagtcccccttgacttgtccccactgctgctgctgtcacaggacaaaggcaggggagcgggagcagcccaggacagccacagggccatgagcaccatgccaccgggagctagtgacaacacagggtggacaggacagagagtggcccagtactgggcaggaccagccacagacgctgctgctctctgagcacggggactctttgcagtggcgcccatcacttgggcagctggaagcacagtttccccccacagatatttcgtggggtttttttggtttttggtttttggttttttgtcgttgtttttttgtttgtttgtttgtttttttgagatggagtctcgccctgtcaccgaagctggagtgcagtggtgcgatcttggttcactgcaacctctgcatcctgggttcaagtgattctcctgcctcagccccctgagtagctgggattacaggcgcacaccaccacacctggataattttgaatttttcatagaggcaggttttcaccatgttggtcaggctggtctcgaactcctgaccttaaggtgatctgccggcctcggcctcccaacgtgctgggatgacaggcgtgagccaccatgtctgatacttggttttaataagtgtgcatcaccgccctgccccccgcccccagcccccagtgtgctcaggtagccgtgaaccaggtgttgggctagtttagtggaagggactgacatggagacaggagagtgggctctggcactgtgagggaggccgaggagcccaccgcctgaggtcaagtcctgcctgtgccacagaaggccctgatgtcccctacaacctcacacatcacatcctcagcaccctaccaatgctggcctctgtgggtagcgtcccctgtgaagggatgcggccctttactgtagccacgctgacctggtcccagagaaggcaagggagcacccacactgtgggggtggggctggttaggacccacccggaagactgagccgctgggtcctgctgccttccccagggcagggtgaagggtatatgctgtccaaggggccctgccttccagaccccactctgcctccgggggaagcccaaacctgcccttctcggcatccctgcctctcctgtaaggcgctgccaagccacactcgagtcactgttcttcctggatcatgccaagggtgggagcctggtccctctgggtgttgaaggagataattcaggtgtgatgaaaaggaatgctcctctctggctctggacacacccaacacagaaggaggcaggtgcctgctaaggctgacgctggttagaggcagtgccaggacagtgccgtcccatatcccaggccgtgcttcccttcctggaacaggccaacctcgatcacagccaagcaccacctgcacaggctcacagggcagagcgctgcaggggctacccgactgggtgtcctaaggtgaacagaagcctttcaatgggacattaacttgaaccgaagccagaggagcctgcatgacactgtgtgaattagcttactcaactgaaacagggcatttgagtgcaggagacactaggctaacaggccaccctacacccctgcacacacacactctcaccagctgcggaggaggctgcacccaccatcccgggctcccagcgacagctggctctatcttggacttcactgttcctgctgtcaggctggggatggaactctctgtctgctgcttgttggagctcttccagcccagggtgttggttagtgggtgaagcaggggtcttctctcctcgccctgccccctgccctgcaccagatgaaagagcacactcagcatcacgagtggctctaagtgtgatgagagaaggaccctccctggccacactcgtgctaataggaagtgctggcgaaagcaaatgatcaaaatcgtatcccagcctcttcatgtcacctgcagccaaatggctttgcatctgaaagccacacataattgtcagcatccatgggttctaatcagagatttttttttttaagtcttggtagtttttgttcattgctaatacagagaaggatgcaagccactgtttagtgtctggatgtaaaagaacatttctgtgccgtgtggcctcattgcagaatcttccaaggtacgagtcagccacggaggcctgtgaggtttttattccttgctttcaaaaacacaagctgtttttcccctggaagagcatgtaatgtgcaaaaacattagcaatattgcaaaatgcttgcgtgaaataactgtggaaatatttcactaactacattaaccttcgctggcttttcttcccctcccaacccaaagagagataatttctcgggagtctttatctcgttcctctgtataattgccgctttaaatcacaaaagcctttagagttatggatgcaaaacgcatggagctatgtttaggctgtgctcacctgcaaagctgtgcgatccaatgtccccccagaagagaaaccaaaggaagagcgtggggaaagctggtgtctctctcgaggtgtttccgagcagccgtgttaatatcatacgacaagatggggccctgtctctcgtcacttccttttgttctttccttctgaagagtggataattcctggcagtttctgtttcgcttgtaattgttttttaaattaagataaaccttgcagccctgactgttgagatgaaggcgcggctggtggggaagcaccttgcttttgtgaacagcagaaaaggtgataagacattgcggtgtgctccctcccagagtttaagcaccgcagttaccactttgcaccatgctcatgggtgagcgggcgtcttccttcttgcaagttcctcccatgtctcagtaacggagaaggaggcggtagtggagggcagtcggcggtgggggttggggagtgccgcctgctgtttggcagcatcgcccgtgtgtctgcagggccctcctgccttcgggtggagggcatgttcacgtaagttgactcatgttttgggcgaacgttggtggtgagaggagctgaagtctccccatctctcaaggatgcagcagccaggtttagttctgtgctctatgggccgcacctcctggccccccatcctgctccggattccacagcttggtcttgactcaccaggaagcagggcagcaacttgagagtgatgcaggggacacgtgcaggggtgcagagtgtaggggtgcaggggtgcgaagtgtaagtgtgtaggggtgcagggatgcaagatgtaggggtgcagagtggaggggtgaaggggtggagaatgcaggggtgtaggggtgcagggatgcagagtggaggggtacagagtggaggggtatggggtgcagagtgtaggggtgcaggggtgcagagtacaggggtacagagtaggggtgtacagtgcaggggtgcagcatgcaggggtgcagagtgccattcctaagccatcgtcttgtgtctgtgttctgtgtatttgcttgcatgcttttctctccagcgtgattttctgatccgtggatacacacaggctcctccctattcagctaaacctcccagctgcctctaaaagctggggattgtaggggtcggggaggcgtgttctctcattgtaccatcacattgaattgtctcaaacaccctgccaggtagaggtggttatttccctttgacatgagacagtaaccattagcttggtggcttcccttggtccagtgagtcattaaacctgacttgttggctacaggcgagtgcctggtggtttctgggcattgtgcttggtcagatccgacgttccgagggttcagctctccaaggccacaccatgtgtccccccggctccctgccctgagctcctcccgaggtagcttgccactcttgcaccctccagtagctctagcacagagtaggagctaagcgcacagtgggactcagtgacctgaagcgggaggtgaattgaatgcctccaggatgagtatgtctcttctcagcagccagaagggtccagtccagaggctgcccttcactgagagcatgctttgctctctaaggaaagcccagagctttctttcaccatcttctaatgtgcattcagcagaagctgtaactcactagaaatggatggaattaaggccaggcatggttggccaggctgctggacagtcctctccagaagaggagcccaccccggcctggaggatggacaccaggggctctccctctgcctccagccctcctgcttctcagtgtctaaatcatcagaaaaaaaatcatttctggttcattgacctttctgcaaattataatttacacccaagggtaaaatgtcatataacttttatgcatttagctgggctttttcactgctatcttaaaaaacaattctttatcaagacttcatgtcagaattgcacagggataattacctcaggagaaacgcttcatttgcataatgcaccatgcacatttccccttggggcagtgttgttgagggctggtgatatgcttctctggaagggggcattggtgaggcttggggatcggtcaaggacctcgtgaagtatcaatcacctccaaactgacttcattaccagcttttttccccagccacaaattaaatcatcagagtggatattggatgggcaggaatcttgacaaattcctgcaggacccggcccgctgtgtggcatcccttccctggctgtgggaggctccatggcccacactctccattggccctttcagagaaatggggtgtgctggagagtgggggccctgggctctttcctgctcaaggacagaagacagaaacctcacaacctccaccttcaggcacctcaccgtccaatgtgagagaaagaacaaactgagattgcacagagatttaggaagcctttgcagagaaacatacagacaagcacgccccaggccaagaagaaatggcagattattttggaagtatccattaaaattacttctttagatgcaggacctgctttggggttttttttctttgtaagtgacattgtatttattgcagaaaagaagccatggttggaaagtcaggactatctctcaatgctgtggaagggctgctgatgaacaacagagacgacctctagcccagcgtgctggtcatgccagccgccgtcatcagcactcactgctacacacatgttgacatatccttggcacagagcccactcatccttccagaagtgaggaaggatttcacctcctcaggcctctgaagttagaggcgaccacatgacttgtcttggccaatgaaatggaagcaggacccaggtgcatccccccaggaggggccttaccaggctgtgtctaatcccttgtggccagtctctgcactggccatcgtggaagcagaaaaacaagcctcttccactctgtcccaaggactctgcagggcagggcgcccccccaccccccacgcatgcacagtggacatgtcatgtgcatggaccagcatcacgctctgctctttcaagtgacaagatctgggagcagtttggtactcctaacccagcctgcactgacagatacaccctgaatttccaacaatgcctttcatccaaggaaagcagaaattttgtgggggtcccgtgatcacctcccctctaggacttctcagaccctctgatgtgcattgaaaatttccaagaagagagaagacgttcctgggacgatgctgttgtgacctgagagtatccgctgattctttcctcgtgctctttagaaacaggatttggatcaggaacggccaccacagacatcctgggtcctgcttgctttggactgacccctggctgaggaagaggacgctgtagaagacattagaaagtggaatggtgattttccttctgcacaagggcagacctcactcttcatcaccgatcaccatgagtctggtcatgtgtccccgactcccagaggatcagagtccttgtttttcccgaagaagtcctcagcaatatcctcacacggcttcatggagccctggtcagcctggagggaagtggacccttggtctcagtggtggctgctcccctgcccaagggcagcctcactgggtgaggagcccctgcacctcctccggacccccgtcctggctcctcagcaccgggcaggcccctcccggggccctctgagcaccgtgcgccatggggcaagcagtgcagctgccgtttaaatgagtgggttctggctctgtcgttttcctccccagggcctgcagcctcctccgggcttggcttccctttgctcaaggcagggttggcctgggccctgctgagggactgggcatgatgggcacctgagaccctaggagcttccatcctcactttacagataccccaagcacctgctcttctcgagggttccctgaacagctcaaaaatgcatgagaagtgaacgcacctgggacaagagggctgacagggagaggtttcctgggcagggctgtgcggtgcagagagaagagaaaatctatttgcatttcctgagttacttcttatttactctagaaaacatagttggcagccaaccagagtgtgtttacagagggatctgggctgggaaaattcagggtcatctttggattcagccctagaaacctggaagtgaacatgagccagacgtgcaagcggctggcggctccatgcggcaggtggggtgggtccccatgcagggggcacaggatggaggctccatgtggcaggggggtaggtccccatgcagggggcacaggatggaggctccatgtggcaggggggtaggtccccatgcagggggcacaggatggaggctccatgtggcaggggggtaggtccccatgcagggggcacagggtggaggctccatgcggcagggcgggtgggtccccatgcagggggcacaggatggaggctccatgtggcaggggggtgggtccccatgcagggggcacaggatggaggctccatgcggcaggcggggtgggtccccatacagggggcaggcagggcacagttgggtggacccagcgggctcctcactgccctgcccctgcttcaaggcagcatccaggcacttaccgtgccagcagcagggcagcctcagacaggagccagcatagccagcgcctgtgttgtaggtaccgcagttcagaaccccgtgtcccgccaagactccccatgaaggccctcacttagaaaactctggaatgtgtgagctgagtacagtgggctcagtgagaaagctcagccctgccccctgcactcccgtggagcccagaggtatttacccaaccacagcctcagagactgcagtgttggctctaccaaaacaaaggcccttccagacagaagaggcagcaggaagtggagagatgagggtgtctcctgctgccccttcgccccgaccccgggctgtactgtggccatcagggctgtccacttgggggcagcagtcaagatgggaagattctgtcttgtagtccttgcctcagtcaagatgggaagattctgtcttgtagtccttgcctctaaattttcctcctgatttgtacacctgcagtcaagggcagagggtaaaatattttctgtttgtgtatttgtttttaatttaaaaaagagagagggccaggcatagtggctcatgcatgcaatcccaacaccttgggaagctgaggcaggaggatcgcttgagcccagaagttcaagaccagcctgggcaacatagcatggccccatctcaacaaaaataattaaaaatgagcagggcatggtggcaggtatccgtggtcccggctacataggaggctgaggcaggagagtcacttggatgcaggagttcaagatggtactgagctatgattgtgccattgcactccagcctgggcgacagagtgagaccctgtctctaaaaaataaaaagtaaatttaaaaaggtggaggagtgaagaggagcctctgtggagtcagtgtgttgatgacactcatgtacacatttcctccacccattcctcctgcttcagggacatctgtggcaccgtccacctgcacacaccgcagcgtaggaagggccttgccccgcacacacctccccgagctggtcatagacagtgcacactgcacagtacacacgcacatgcataggcacctgcagctgggaagggccagagccaggacccaggtctggtctctctgcctggagtttcttcccctgtggcttcgcgctgcctgggagcagggagcactgttcccagtatcaacaggagctgccttcctgaagctcacctaggcctcagctctctttctctcagatgtttctgagagctttgagaggaaaaggaaattgtgactccctccagtctgaatggatgaaactgccacaggaatgctttttaaatacagaaaacaagaaacacccccaaattgcacttatgggaaatggagtgcaagcagaaaccaaccctggacgcccgtcaagagtcgcccctacctccacctctccagtgggctttcccatctgcagagagacacaaggggggaggaggccagaggtgagggaggggaaggcgaggaaggggagggctgggaggggaggtggcctctcaggacagcaaagagagctgtctctccacctgagccttaattgcaagtgatttcattagctcagtcctgatgtgcaaggcactaatgagggaggcttgcggctctagaaatagcctggccggtcctgtgtcttgtgtttgaaaggatccaccccagggcctggcttccctgagtcccagctatcagctccaacatctttctcaccacgtcacatggacaacgttcagatatgtgatgggagctttcagagacgacaggagccagcccccagccaccacgaccagggccctgcagtggggagagcatggcatggggatagtctcgggggggactgtggtgaaccctctccactcctgcagcaacaagtgtgtctgggtacccccagtggcccagggctgatgccacagaagaaacaggagccgaaaagcagctgggagccgccagtgaccattggcaccagcacaggccaggtgcctcatggtggagtgagttatcccatgagccaagcctggggtattctctgaggtgccctgcggtggtttctgcttgggaaccccctcctcaactgatacatcttgaaggcagagactacatttcggaaatcagggtgtgctgggtgtttatttctcagtgtgtccatatgtaaaatggggtgatagtagtcccagcctaagggcattgtggggacctagtgaggtgctctgtgtctcgagtttggtacattcccaggcatgtggtatgggccaagtaagcaagaactgccatcatcatcattatgccatcaccaccattgctgccatcatcaccatcactgccatcatcatcaccatcagtcccatcaccaccatcatgaccatcactgccatcatcaccatcagagccatcatcaccattggtgctatcatcatcaccatcgctgccatcatcaccattgctgccatcatcgtcaccatcggaggcatcaccattgctgccatcatcgtcaccattggtgccatcatcaccattgctgccatcatcaccatcactgccatcatcaccatcactgccatcatcatcaccatcggaggcatcaccattggtgccatcatcatcactatcagtgagatcatcatcaacattgctgccatcatcaccatcagagccattattaccatcagtgccatcatcgccaccataggtaccatcatcatcaccatcagagccatcaccattggtgctgccatcatcaccatcgctgctatcatcaccatcactgccatcttcaccattgctgccatcatcatcaccattggagccatcaccatcgttgccatcatcatcaccatcagagccatcatcaccatcagagtcatcatcatcaacactggagccatcatcaccatcagagtcatcatcttcaccaccggagccatcatcaccattgaagccatcaccatcagtgccatcatcatcaccatcagagtcatcatcatcaacactggagccatcatcaccatcagagccatcatcaccatcggtgccatcatcggtgccttcatcaccattggtaccatcatcatcagtgccatcactatctctcttatcaccattgctgccatcatcatcatctctgtcatcatcaccatcactgccaccatcatcatcatcactgccaatatcatatgcgttattattatcctttaccttagtccacctttattactttaaaggacaacctgaggctgggtaatttataaggaaaggaggtttaatcggctcacggttctgcaggctacacaggaagtatggcatgggcatctgcttctggcgagggcctcaggaagcttccactcatggcagaaggcaaaggagaccataggtgtgcagatcacgtggtgagagaggaggtgggagagttggaggtgccaggctcatttcaacaaccagttcccttgggagcttagagtgagaactccctccctcccttgagaatggcactagggaattcatgagacatctgtccccatgacccaaatgcctccccccgaccacccccagccacaaggcccacctccaaccctggggatccaatttccacaagacttagctgggccaaaccaaccatgaccacaccatggcattgctgtttgctgttagggctaaggagaggccttgcccaggttagaagcaggtgactcactcccagcagtgtaggaagcacctgcgcctcttcattatggaagaaagagctcagggccccttgggccacctcagtgagtgagatttagccagggcctgagcaggccacctaccctaggaggatccagagacctcagcacaccttttttctctctaaaccccatcagccatagaacctggcctctctgctttccaaggctgtgagtgagtgggctgctgtgttctgcagggggtgcttaacatctaagcataaccacctgtttatgagtagacatctgtgtgtgtcttgcatccaggaagctcttcatagcaaaagcatagggtggaagggagcagggtggtggaagatcacgtcactgttgacagggcaatgttatttagatggtgccttattctcatccttccatcctctaaaactctgcttgagtttgtctttcaaggaagggctcaagggccatgtctggaatgagcaggaaaggggagtgccaagcaacatgaggctcgtgagggtggggagtggcagtgagccagatgcccccaggtgagcactggcccaccatgccccagcggtggaacctcgggatacggggcaggatacctgtacctcagtttcctctttgggaaaatggaaggaacatgaccttccatataggtttgtgtgggttctgtaagagaatgtgctccaagtgcccagcaggatgtctgagcagacagtattgaatgaacggatgaatgtatgagtgaagattcaggaaacactggttcatgttggttcatgaaatgttagttccagatattcaataaaaatgtgacgtttttaagagttctaaaaataactcgcacttctccacaccgttaaatggactctcacagccttgaatgagagagcaaaagtcccagcaaggccaccccctccaggttcccaaggaacacccctagccatcaggacaccgctggccctgggagagagggacaaagggctttcctccctgcagtgactcagggcagcagcggtgccccgatgtcctggccaatgccgggaagaatgtcagtctccagccgtcctcgcccatgtgggaatgacaagcaaggctttgcccattagccctgttgctctgcgagcgctgactgcagcgtgttttgacaagaggccctggcatctcacaagcccaggagtcctcggtgcatggcgcattggtggctggatttgccactattattctctgctcactcctgtgttggcgtgagtgggaggacttcattagcgacatcgcccacatcaagagccactgtgcttcgttccagtgggcaccagtaggactggctaatgaggcgctcacagctcagtttctacggccactgtggaaaagaacttttgtgtaaatacctgcctcagaatgtggcccttccctgcggccccctcttctgtatctcccaatacacctgcactttttttcttgaacagagaactgttaattagtgccagaacctagagaaattcctctctttatataggctcagagccctttcacgacgtaaggctctttcgccacagcagggagctgcaaacaggcttgctgaggtcctttgaggagctgcgtctcctcttggcagagtctctggtttgcacatagcaccataaatattcaacaaagacgtggagacgatgagtgcaagttttgggggacagggccacaccggagagtgtaaggcacacacttgttgccatgttggctggcttttcttagacaggaagaatcccatggtattttctcatcagagagagatgcagtgtccatgaggatgtgagattacagcgttggatgcatcaagaagaaaagccagagggagacgcaagtttaatatttcctgccataaatgagacggcaagagagaggtttcactgttttactttataatgggatttctaacattccggagacagagtgttttgttttctttggagaaggtacagctgatagatagtgaatatccatttcttaatagactttggttttcagagcagttttaggtttatgggaaaatggagcaggaagtcacccccctctcccactgccagcttcccctgttgttaacgtcttgcattcgtgtgttgcatttgttaggactgacggacaatggaaaaataacatgtcagtaccgacgcgttattaggacacagtccaggctccaggagggctctgtcttggtgtggcggattcgtgggtttggacaaatgcatggtgggtttggaccaaatgcatggtgacacggagccaccactgcagacctcacagtgctgcttccctgcctgaaagtcccccatgccctcctgttcatccctccctcctcccacggtcctttcactgtctctgtggctttgccattttcagaatgtcatggagttggaatcctacgggtatgcaacctttcagatgggcgtctttcagttagcaacatgtccttaatgctcctccatgtctgggggcctgatagctcattggatatccatttttgaagctaagggaaatggaacttgtgcatttaccccattaagttttctcaagcacttcctgggtgccaaagtcacctggttggaaggtgccagagaccccggtgaggaaggcaggcccagcgcctgccagccccaggcccacagactggcaggaggtggccggcagtttcaggccctgcctgtgcttggagccagggtgaagccagccagggcaacctgagcagccatcagtggagacactcgactgcatccctgtgactgcaggagggacaggagcagatgagccttccagaaacgccagatctacttgctctgtgaggcagagattggtgctgggggcagggcctggctggggagaccactgggccatgcaggcagcgggctgagctgggcggcggggtctgggatggattgggtgtccagttggggtatccaggggctccggctcccacgtggaaggtagcaccccttcctgtggcagctccaggggaaggagcagctgagggggtctcaggcagcaagggtgtgctgtgtgggcagaccccagagacctcaccctggggtctggagttcaggagaaggatctgcaccgggagatgtcctggggcccatcacggcagggtcctctcatctgcagagcatgagggcgtccgagtccccccctcagccctcagccctgcccttggctctgctcaggccaaacagtcgtgccgcttgtggtgtgtcccattctgagggtctcctgagggattttggcctcgtgacattctcctcacccctcggccccccggcggcccctcacacgtgcccagtcaggttctgtgttcccgcagcacccttcctgaccgccaccctcctagatggttctgagcacagccctgcagccctgcatgagatccctgccaccccacaggggtatgctcagtcaggatgatctctttggaaagtgcacgccgtcccatcactcactgggcagggcccatagggtgcacctggagcctgggcaggtcccccccaggtggggtgaagcagaggcttcagggcagcctcagctcctccacatcctgctgctcagcagattcctgaggcagctgcatgtttgtagaatcggaaaagcgccgtttccagcgggacgcctcctgccaagcccagaactgcgcaggtgggttgggatgggcaggccccgtgcagacgctgccacatcatctgggaaatgctcccttggtttggagacgtgagtgagtggctcgtggggtagaaggttctcaaactgttgcaggtgtcctggcaccacgggggtgcggctgttcctccacccgactgtcacccccacgaggactcgggggctgcacagcctggcggggatgcctctactggagggtgtgtcccctgggatgagcaacatcagaacccaggttgccccacctgcacggtccccctacccacccactccccttaggagattctccttcatcaagaacctgagccagcgccaccaccttcagaaaccttggactcagactctgtcctctctctccctccttctcagcctcctctcccctctgggagctcctgctgcagtgacggtgactcactgctgggctggttcactccaaagtggctcgagtgcattactcaggtctttgcaataacccaagatttttctgtgtacaaaatatgcatatgcgtttgcctcccagcagcatctttcatgggagacagtggcttcctagcaagtcctggtgaagtgatggacatgaacactgtgatattccaaaccaacactcagtctctgcactgcctcagggaaaaggagcttttggagttcaagtcccagctctccaacctacaagtgtggaggtgaccgcgtgccttggaatcaaatccagaaatcgtactggggctcccggagcccacaggcactgccccatccctccctgcctcctcctcgctcccttcctgccccccagtctcctcccatcctcagatacactaagcatgcctcaggacccagggccttgcactgtctgttccctctgcggggaatgctcttccctcaggcaccaacacagccttccacctctcttcattcaggttggcctattggagaggggatgcctccctccagtggctccataacactacccctacctagccaggcacgtccagctgccagctcatcacgcatggtcccccactagacagcttcccgggggaggacctcggtgtgcaccgctcgtcccccacgcctgtgagagtgctcataggcgattcttgaatggataagtgggagaaaggaagaggctggaggttggagatgagccccccaccccatgtccctgtgttgcccgaggctttgatgtctcaggtagtcttgttccatttcgggcatctcaaagcagaagctgaatgtggcctccgccctgtgccacatgtgctgggagccccttcagcaccggctagagtgaccagctgggggcctaattctccccctctagaccccagctcccacctctgaaaacgggggtgctctgggctgtgtgggggcagcaggtgtgagatgacgcatggacagatggacaggaaagcagtggcccagggcgaggtggggaggtcaggggagggtgggaaagaagaagggcagtctcctgggacgctaggtgctcagttgctaccgctgctgatgtcgtttaggagggtctttggttgtttcaagggaattctctatgttccacacagagcaagttccgggcagtggcagccatttacatgcccaggggtctgcagttgtggtccacgcccaccaggttggatcccagcttctcccatcaccctcatcccactcacagccgccgctcccagtggttctgtacctccaggccttcacacgtgctgttcccgcatcaaagcactcttgctccgactttctgggtctgctcccccggtcacagaggcctcgggatgcatgcttcctcccccacagaccctctgctccctcatctcccctgctgtccctgtcacagtgactttgttcgtgggccggctgcctcatggtcttcccaccacactacatgccatgtgggctgactgcccagcacccaggacggtacgtagggaggaaatgggtacacgatggatggatgaatggaaggaaggaaggaaggacacagagaaagagagaaagaaaggaaagaagaaagaaagaatgaaagaaagaaagaaaaagaaaagaaaagaaagagcaagctggcaacctctgctggttgaacctgagggtttgaaactcaccctctcctcagcacggtcccagctacaagctcacctctggctcatttgatctttctcaattcacctaacaagaaaaacaataaaaaggtgtgttttgtaactgcagcaccattctcctgcatgcccgtcttggggagacacagcctgctgcgcccgtaaatgtcagcaggctcctgccgcagaggaagcggagcgcatgtcactcagggctggttcccagcgcaggctgtctcctggcccctttcacagagaagcaattagacagatgggggtaaagggttaacccggaagcctcctaatgaggggagctgccggctcctctgtgggtgcgcgatgccgagtctccacagaggctttggatccgcatcactgcacccgtcactgccgtgcacgcgtgagactgggggctggggggagatgtgaagtcacacactaagaaaattatttccttcatcttggaaaaacaaaagaagccgggctctgctgtttagctgagggtctaattatgactgctacatgtaatcctcggagttcagaactggcccaagcctgggcagggcccactgcacacttcccaggctcggaacggggagttgttgtatgtgaggtttgcaccagctgcaagctttgtgaatacacacaattcaaagaaaagcaccgtggcagtgcgcttgtgacatgctttgcattggggcatctactacacgggatctggaggtgcccagagccccagacggggagggacggccttggttgtgactctgggccccgcatggtgcagggattcaataagggtgtgggaaactgtttgaatagtgagaattcatcctaaaaggtagttttccttcagcaggttgagtttccctatcacccaaacaaggggctggagtagatcatttccaaggcccctcccagcctggcatgctgcaggcttggggccgtggggagctctggagactgagctcagcctcagcagtttctccctgtaccgccagttttctccgtccccacccagcacgtggacacagcgcacacaaagcgcgcacagtcacacgaatcaacctgggcagatattcaagaacctatgaatctccctcctgagtccccagggctgaggcccagcgcagacgatagcccccgctcccgagaatctccctgcgctgggtgggcctcgggcaggcgcctggtgatggctgttgctctgcggcccctccctgtggcccctcccggcaagcaccatcgtcttccccagggacaggaaaaacgacagaggggccagaaagagagaggggtcgtggaggagggaccctgccctgggctgatctggagatctctgtggggagaggaagctgtggccggcactcgggacccactccagggagatgtgtgagactcaggatgcggttggggccccgtgggcacagagctcaggaggactcccccgtctccccagcagctggaattagggaccccagaagctgcttttttaaaactgaagtaaaattcacataacgtaaatgtccccattttcaggcatacaattcagtggcattgagcacattcaaaatgctgggccaccgtcaccccaagggaaacctggtccccattagtgctcactcccccaccctcctctgtttcttatacccccctggtgggcagaacctgtggcaggtacaggaaggtgcctgcagggaccacagcccagcccaatgcagacccccaaggggttccccagggactcggggaccaagcacaggaaacctggggggccacagggaccctgaggttctgcctcccggccagcgccttcggggccactgcggggactgaggccacatctgccccctccgctggaccccgtgctccctgatgatggtgcccagggttggggcctccccacggcctccgtggctaacgggtctttgctgcaggaatggaggaatcgacttccctgacattcctctcttctttcttctttcttttctccttttcctggctcttgaatttctctgtccccagcagacgtgtctgagagcatgtgcatgcagcgggggccacagccttctgcctcgggggctgtgatcctctttgcagccaaatattgaggatgtgcttctgaagccaccgcaacagccttctaactcagctcccgagttgtttgcaaggctaggaaaggccgtagctctcttaacattgggccctaaagggggtgtctgggtgtggcttccactcaggacaccccctcagtcccagaggatgcgggacctcctgggagctcagggtgccccccactcctgtgcagatctctgagccttcttgcagtcaccaggtcagcagcctccatgcaacatctcctgggccagtccccaccccgaaggtgtaggttatctcgctggccgagggtcttcctgacaccatgctgtgttcattcttgtcacctcagctgcccctgttccggtcacaccagctctcaggtcctggaattcctcccttcctctgccccaggacctttgcaagtgccatcagcactaccaggaatgtgctccccacccgagccttctctggaacctcattccccagatgtccacggaagggtcctgttatcaaggaagccctccccacctgtccacccagcctgggtcaggctctcacagaacctgtgtcttccttgtagagtgccgcacgtctgatgtgatgacttggttaatgtctgtcctgccccacactctcagctccactggcagtctctgtgtctggtgtctgctgactggtggtatcagtgatatgtcatgcgaatggatgaaggggagagggagggaggaaggaaggagagggagggagggaggaaggaaggaaggagagagagagagagggagagagagggagagaggagcaagctgcccttcttcagctgtgcatatccagaggcgcattcacgacaggcggggtcccttcttaggggagcagaattggcatgagtcctgggagatggagccatcatgaggtcacccggggcgggggccacagaaactccatccacaacacaaccaagactggggtgacagagggagactaaggcccacattcacactgccgaagacgtgggtgacaggcgggggccagccgcatcccagcccggaaaggggaaggggagaccggaccaccctcagcctgtgctttgctctacagctgccaggagaaggtcgaggtgcaggggctcgccctgggacgagtcccaggctgttggattctctggtgtgcagcccttcctgggaaggtttgcctcagcattcgttgctcctcgtgttgcttggatggctttgcagatcctgctggatgctggccctgggggctgagccctgcctggcatttggtcatatttcagagtgggcaacagagggtggtccctggaggatgaaagatggagcagcttctgttctctggtgtcttctcagaagaaaacatgggctttaaaattaaatccatcttgtccagaacaggaggccagcggtatggggccaggttgcccagaacctcagaatctgttgaccccacaccttggggtgaggagagggagctgacccccagcagaacaagagatggatccccacaggctcagaatcccaagagccagctggccgcaaacaccctgcacggctccccatcccaccccagggacccccggcctgactagggcccttgtgtgaccccactgcagcctggagggcttggccatccatgctgtcatcacctggccactgaccaccctggcctcagcctgtgcggttcccggcagaccccggtgttcagtaagtgtttgtgggatggacgaccttgaccttgtgtgaccttggctgggtgccttgctccctggtgccatgtccatgccactgaaggatgccacagggcatactggccagagcataaggacagcagccgacatccacccagtgcctgccctatgccaggtactgagcaaagggatcaacatgctacctttgtccccctccccgagtccctgccatcactcccatttcacagaaacaaagactgtgctcagagagggaccaccgttcctcaaggtcacagagacaggaggctgtggttggtgtttgcaccccaagaccagggtaggtgtgcgcagggctgctggtgcacacccgccttgctgggcacatgcatacctgccccacagcgcatgcagcgggtgctgggaccctgaggttccatgcctgtggctctggtgtgaggacagcaggtgttcccctccccaccctctggggcccacctccttggggcaggcggtgccgggcctgaccccagggcccaatcctctgtgccacctccagcactggctttggggtctgcagcaaccaccgccagggggacagaggcaagggaggctccgactacatgtttaaacagttagatttaatttctctctggacccttctgtctcttgtcaagtttgtttaaaactaatggaagtaattagcaaaccatggagagatgcgtgcggcaggtagcggctgtgggtaccaggcaccaggcagtcccgtgtcggccgaggatggaacaggtaccctcctccccaggaggatttccctctgtggcacctgcatttcctcacaggtgttttctcccccgagaaacaactcttttgtcccccacagtactttctggggctgcagtgtccctagggcccaaggcagcaggctggtctgcggcttccctgcagaacccctgcattctgaggcagaggtgggggccaacaccccagcaggacctgaggggccatagccttggggattcctcggaggcacggcctggggtccagttcacacatcagctgcagaaggttccctcaggatgtgcaagtcagaagctccccacaccacaccaccgcccccatcctccaccaggcttggcatcctcccagcctcgggaagaaccaaccctgctggacgagggtgacagatccctgaagtcgggcagcaaaccccgctcctcctctcaccaccttcacggcaatcccgctcctcctctcaccaccttgacgaaggcgtgaaacgtccctgaggctcagcttcctatctgcgagatgggccagttctactcgccagcgctgccttcccgtgcctggcagtgcacccgccgcgtggaggctgcaggggctgggacaggacgtgtgatctgcattggggtcgcagaggcggcttttcagggcattgtaggtgtttgctggtacatcgagggaaaagttttctgggaatccattggatgttaattctctcctgaagactaatagagaaattgggagatcaaaaacaaatacataagaaaactaaacttccagccggggtggtgccactggtcactcgccttcacgcctgggcggctgctggcgcagtctcctctgggggctgtttcccatggggagggagttgcggggggtcccgtgaagattctgggctgagcacaaagcaggacagaagccccctttctgccctcagcctgatgggagccccggaccagcctggggaggctttgcccctacttcaccctgaccaggtgcctgatgctgtccggtcccaggacagcagccctgacctcagcacactcaccagtcctggggcgggagacacgggaggacatgggaatcccaggtacgaagccagggaatgaaacaaaaacaggtgatgtgaggggaggggtagggcaggttacaggtttccatgggagccaacatcccagccaggcctgagcactgggccagagccagctctgccagaaaccaccagttacaacctctgtgtccagtctgcagagtccagagtgcgggtcctggatggggctgaggcaccagattcctgcctagaggagggtgagtgacagcgggcttggagcccaggcccagttcagaaggtaaaactggaaggactgcccactgctggccagagccaaggttcaggcagacagcaggccgctcccggccgctgcagaggcgagggcagcacaggactccaagcgcccacagaaagttctataagcagttgggggcctctccagccgacgcctcaggctcagcctccagccacattcgtagagaggcaaagcagaatccaaataagtcagtgccaggcaacaccgtcaggagcgtcctctctgtacacggagaccctcagtgcatgccgacacccacacatacatgggcacttttctgttgtcctcctggaatgcatttaaccttgcagagacaggcgaagactccaaaaattaaaaaggaagcaaaaggaaggaagcaggttgaagaggaaacaaaggtgaaaagtagaatggaacgtgctgaggttagtaaatgtctcagcattgttagaaaagccagctacggtactgcctctgagcttcccagtagcctaagtaaagagggaaaccatttttaggcaattcacaaggaaagacaaataggatatggggaggagtccccatcccaagacctcagacatgtctcccttgaggctgccctgcacactcacttgccgtttctatagcatggcaaagtgttagtaacattctgggttgtgttcataggtacccacatttcacagagtttccaaacagattgttcatacattcagtgctaatgttctgtgaatgcccctggcgtctcagaagacttgccttattgctctttccttatgaaagaggccacagcctggtggggcacaggagcaggtattgaaggttctgaagctcctttcttctcctggaaagcaggtccccccaacaactggggtctctgaatgacccccccatcttccaggcctctctccaggagggtgtgggccagcaccatttgcgtaaccgtatcgtgacctttgtcccttgggctgcttccttctctaccagtgacaactcctgttttcctcctgattctccacggctgaggactcagaatcacaaatgctagtgggctgagtgttcagacacagaggtcgtgtttggagcggaacacccaagttatggttagactgaaacaggatgttgggactgcatcttgtcacaaagccctggagctttctcgtgattggacggggcctgttagacacagacggaaaaggcataaagatctaggaagttgccgggcacaggggctcacgcctgtaatcccaacattttgggaggccaaggcgggtggatcacctgaggtcaggagttcgagaccagcctggccaacgtggtgaaaccctgtctactaaacatacaagactcagctgggcatggtggtgcacgcctgtagtcccagctacttgggaggctgaggcagaagaattacttgaacctgggaggcggaggttgcaatgagccaagacggcaccacggcactccagcctgggcagcagagcaagactccatctcaaaaaacaacaacaacaacaaaatctagaaagccagtgtgcaggggccctggtgcggtcccccgggcatcacttccccaagccacccacggagctgcctttgagggcgctgtcatcagtttcatccagggtctctccggcagggaacgcctttcacctgcaaagtccttggttcatatggctgacgccaccgctgtttcctgcctggtcattcagacgttggtggcccattcgttctcaaagcagcttcaatgcttgcctaagatgtcaccaaagctgtgtgcctgtacttttttttttttgagaccgagtctcgctctgttgcgcaggctggagtgccatggcgtgatctcggctcactgcaagctcctcctcccaggttcacgccattcttctgcctcagcctcccgagtagctgggactacaggcacccgccaccacgcccggctaactttttgtatttttagtagagacggggtttcaccgtgttagccaggatggtctcgatcccctgacctcgtgatccaccctcctcggcctcccaaagtgctgttgggattacaggcatgagccaccacgcccagcctcccaaagtgctgagatgacaggcaggagccaccgcgcccagccgcctgtacttttttttaactacaacactgtgtttaatcctgaagacaacacaaaccctcctgctgctgtccaattgcattagttttattaggaatttgcttttagggaacaaaggggcttgtttgtgtgtttgtgctcatctctcagcaatcacagcactgtcatttttatctttgtcagtgacaatcagatgtcagaaatgattgatccactaagttgttgctgattttaatttgtttaccattgggcaaacagtactataaaagcagtttggaattttcctgtcacttcaaaaaaaaaaaatgtaatgattccgtccttagaaggggaacagatccggggagccacagcagacccttgcctgggttgatcctgtccatcagaggagccaccggggggctctggagtctggaagtttcattgctctgttgaaccagacagggtggaaatgcctggtgtcatcacatttaaaaacattttcacatgaaaatgtttcacatgaaacccacaagtaggaggtgccattggctgggaagatatctaaagtgaactattgagaagagggaacagacacgttatttattctttcaaggcaggcaacagtaaaaggtgaatgcgaggggaaaacactttatctaatgtaacagtgagtcgctttttttggtttctcgaataaatagtaattaaatcatgtaagctgtgacagcaaaattgcttgaaaaaccaatcctcccaccataattgcttagatacccacatttttataaataggagttaactttatccgtggcttttatgagcagaatgtgacacgggctgtgggtgcgtcgtaatttaccacggctgtaggtgacagttgcaaaagcacacgtctaaaaaatgcactaatgtgtccggatgaatctgcgcctctggaggtgtctttttctgcagcagaattagagatggccatgatgctggagccgtgaagggaggttggcatcctggtgcctactggttaatgttttggaagcgaagcaatgctcagcacccagcggtatcaatagactgtctgacttcaactctgtttccagttcaccaagaaagcacttggtggggccagggtctgccctggccacacctgcctagcccaccccaaggccatttgcaggcatcaggtctggcttaataataaaaaggaccagaaacacagcagagccgagttctgctgccagaatccacctgccatgggggaatggtccccagatgccagctctctcttgctccttccttgtacttagccttcttggagtggaaaaacaggtccattagtggcttcacagtctctgctggcaggaagaagatttgcataggcaagagtggggggaactgagggaatatttttgaggtggagaatacccactgtgccgctcacagactccggctgaattcggagataacagcggcaagggagagatgcgtttgcagaagggagtgcagctgtgttgtaaatagaatggaagctcagtgttgcttttcttcccccccttttttaaaggcctctggctaattctctagggggttgagataaaacacaccaccttctcgggaggtggagaaatcagtgcaaacctcatgcccctcatgcccactgggggcctgtagggcgtcctgcgtggttgctgccattgttaccgcccttctgctggccaagccgaccctgactctctccccctcctcttgcagtcaagttcagcagctgtgtggggaccaaggggacacaatatgagaccaacagcatggacttcaaagttggggcagatgggacagtcttcgccacccgggagctgcaggtcccctccgagcaggtggcgttcacggtgactgcatgggacagccagacagcagagaaatgggacgccgtggtgcggttgctggtggcccagacctcgtccccgcactctggacacaaggtaaggtgtgaccgcccgggtctgcgctggagtttagatgacctagttcctcctgcaggccctgggcagagcctctgccagggctcccacaggacagacagtcacctcctcctcgggctgtgccactcaggccattgccaaccaagcacccctgccctctgcactgacctgaggcagggccgtcattgcgggaaggccccctgggcaggcacacaggccccacactcaggttcagacactatgccacggtcttgtcgctcttcatatgtttttgaacaaggggccccaaattttcatttcaaactgggcactgcaaattctggaatctctcctacctcccgaagtttgtagtccaccaggcccagggcgttctgaagcctggagggatgagaagcaagcggagactgtgtggttggaaaggagccaaccagagagtggggaggcgatggagagaataacagagaggaaggcaggtgcagggagacagcaaaggagagggagaagagaatgagagagggatggggagaaagagagaagagaggtggagagagacaggaaaggagagggagggagaggaagagagggagagagagaaggagggagagagatggaaagaggtggagggagagagagaaggaaagggagggagaggaagagagggagagagagaaggagggagagagatggagagaggtggagggagagagagaaggaaagggaggggagaggaagagagggagagagagaaggagggagagagatggagagaggtggagggagagagagaaggaaagggagggagagagagagacagacagacagcttcacacagacataaaacatctgctgttcaggatcccagctgccctccgactctgcctccttctaacccggctgcctggctcacccgggtgacagggaggggcgccttcaccatgccctgtcctgaggctccctttcatcctggcatattccagcaatccagcaccaggctcctgaacaacctgcgttcatccccagttctagctgttaggttccccgtgcctgacggggaagtggccaggtccccttcgccttgagtgtcctggcgttggttgcagccactgcgccagccttcaggtgtggaggctgctgaagaagctgcaaccaggcggcctgtgggagagcactaaggaaggccagcctgcaggtccagctgttgcagctgcctgcctgaggggccccagtggtggaaagaatgtgtgccaacccctccagatccccccagttaacatgaggcctctatggggtcgtttgagatacggtgagcaaaggaaatcaccacgcaaggcggcggccactagcaatcatgggcactccctcggaaaagggccctcgggaagtaaagcgttaagcagaggcaagcagattcctttccgtgggtttcccagaacctcatgactcatgtgctgtgtaagcctctgagtgagaccagtctgcaagtttccccaaactgtctgaccaaggaacccttctccatggaaagcttgcaagacaggtgtgccaaggaacccactttgggaagggagggacctgtgtcttcttctgacttgtttctcagatggaagcggagatggaagcggaggtggtttaggttagaaaagagaaagtgtgactcagatggacagtcttcactgcatgatgagctgaccccacgggggaaggaggtcttgagagtcctcctgagtgtgttaaaccaagcagcagagcacgcctctaacggcagtggcccccaaatcatgagccccacctgtgagtcctgacgagtctaggacggtgtatgtcattttccttcttccctgagtgattattacaagccacgccctggtgagcaaggcaggcccttggacagcctggggaccctgtcccatgggggtcccttccctccctgagctgtgccgggacactgacaggcagggactttcatccccatcatgcctgtgacttccaagctgtccccaagtccccgattgtgagccgagagcagagcccctgagagccttccaaggcctccgataaaggctctaattgaaaatataatgacaccttttcttgggcatgttaatgaagcgatttcagatttaatcccctgatcctctgcagaaggggcaggcccagctgtggttgccgctagacagtccccgtgggaatgtgcctcgacccacaccaggctggtgcaggaagcacccaaccagcggagcaggggacactgaattcatgtcccaggctcagcgcaccctggggagcccagatgttaaaccaggcagcagagcgtgcctctaacagcagtggcccccaaatcgtgagccccacctgtgagtccggcgtatgtcgttttcgtactttcctgagtgattattacaagccacgccctggtgaacaaggcaggcccttgggcagcctgaggaccctgtcccatgggggccatggggtcactgtggggcacagccctgagtccctgagacatgactgttgcagggcacagtgggcagtctctgcagcccaggagacccggtcctccagcgcttttgttgccaatggttcctctcctgactttctagcacccactcagaccttgccccaagtggtgtaggctcatctaaccctctccacacccctggaagtgggtgctgttacatcatggatgagggtgctgagcatgtgaccacagccctgtgctgcacaggagaactgatgtgtggggaaggagtggaaaaggactttgcaggtatggcagagcccggcatggcgcaagagcagccacccagggtgtgggtgcacggcaaggcttctgcgacttactggctgggtgttttgggagaattcacacaactttgaggtgaactgctctggagaatgggagagtaatgctacccatgtcccagccaaagggtgctggtatttcatgaggttatggaggtcaggaggtggaaaacagcagcgcatatggctgtcattgcctggttccaggcttcacagtcctgtgcttatcacagtgctgggccttgccaggtggcatgggggcaggaggaggcaggcagggagtgggggtcactgtgggacgctgggccacctggttgatgcgcccttacagagcgtgatgccagcctctatagatgatcaaggtgacaccggattgctggtgtcctggccgcctgccagaagcaactgtgcatctcccccagtgtgaactgtcacccaggccttcagctgtgcccatctcctttcatattcaacgtccagcactcggcctcatgactgggcacatgaggagggacaagacatagaaagaacaatcgaaagaagaggcagataagaaaggacccacagggaccgggcgcggtggctcacgcctgtaatctgagcattttgggaggccgaggcgggcggatcatgaggttaggagatcgagaccatctggctaacacggtgaaactctgtctctactaaaaatacaaacaaaaataaaattagccgggcgtagtggcaggtgcctatagtcccagatcctcgagaagctgaggcaggagaatggcatgaacctgggaggcggagctcgcagtgagccgagtgagccaccgcactccagcctaggcaacagagtgagactctgtctcaaaaaaaaaaaaaaaaaaagacccacagaggctccagagcatggggcaatcagagagattttacactaactacacttactatctttaagcaaattaaatagaagactttgagagataattagaaggtataaaacagaattcttaatcgttgggcagtttggaattgaaaactaaaccaaacaaaatgaagagctcaatggatacatatatctgcagatttgacatagctgaagaattagtgaagcaaaatatatcaaaaacattcgtgctctaaagcgtgaagagatacacagaaggaaaatacagaagcaaccgtaagagatattagagaggcagtaagaaggtctaatgtgtatatttgcaatatgagggggagagagaaaatggggcagaagtaatatttgaaaatatagtggcagaaaatattccaaaactgataacattcatttaggcatggattcaagaagccctgtgaactctatgcaggagaaatatttaaaaaaaaaaacagcacctggatgctttatagtaaaatagttagaacccaaagacaaagaggaaatctcaaaagcagacagaaaaggcagaattcctttgaggaagcaatgactaggaggctgacttctccgcaggagctggggcgttgtgggggggttggaagaccgttccattccatgccattgaatgatttcttttcttttttttgagacagagtctcgctctgttgcccagactgcagtgcagtggcgcaatctcagctcactgcaacctccacctcccgggtttaagtgattctcctgcctcagcctcctgagtagctgggatcacaggtgtgtgccaccatgaccagctaatttttgtatttttagtagagatggggtttcaccgtgttggccaggctggtctggatctcttaatctcgtgatctgcctgcctcggcctcccaaggaatatcttaaaagtgctaaaagaaaatagaattctatcatccagtaaaactgtctttcaggaagtaaagttgaatgaagagaaactgaaagaatctgtcccaaatgatgttcttcaaacaaaaataaaacaagttgaggtgaacactcagaaatggaggaaagaatgaagagctgggaaaaggccaagaacactgaaaaatacaaatgaatcacagcagtgtaatgtttcatgggtgtaaacagagaactcgaatttacagcaaaaactgcataaactttgagaagggataaatggaatcaaagagatagaagttgtttgcatttttctcaaaaatgatggaaataacaaattaatattactcctaaataagacgaaaatacttgttataaagtctttagaaaatcactaaaagagtcataaaagtctgtaagtagtaacgtaataaaaggaaaaaatagaataataaaaattatcaagccaaaaaatgcaaaaaagagaaatgaaaacagaatagatgggctacacatttctctttgttgtaatttaaaaaattgatggataaagataaatccaactatatgcagtttgtaaaagatatacctaaaaggtataaggctaaagtttagcagtaaaatcctagagaaataaataccatgcaagtaccaatcaaaaggaagctagtggactctgttaatatcagatgaatagaatctgaggaaaaagcattctattcaaggaggaacacttcgtaatgataaataattcaccaagaagatacaggaatcctaaatttgtgtgcacttaataatatgacttcaaaatatttatgccaaaattgatagaaataaaaggagaagtaactatgcaatcagtggtcaattttaacaaaatttcttagcaaataatagaacaagcagaaaatatcagtaaggaaatagattagaatcacacaattaacaggtctggctttactgagacatataaaagcacagaaaccaaccactgctaaatacacatgatttttaagtatagacagaacatttacaaatattaaccaagcaagtcccaacatacttcatagccttcaagcaattctcaacatacttcaaaggtttaaaatcaaaacatagtttgttttcttaactcagagcaagtaggctagaaatcaataacaaagaatgtaactggaaaatccccatagatttagaagttaagtaaaagccttctcattaacccttgggcaggaaaaaaaaaaatcacatggaaattagtgaatattttgaactgagtaataaaactactgggatgtagctaaagtcatgcccagatggaaatgtttagccttaaatgcatatattacaagataaagaaggcagaaaattggctgggcgtggtggctcgtgcctgtaatcccagcgctttgggaggccaaggcaggtggatcacctgaggtcaggagcttgagcccagcccagccaacgtggtgaaaccctgtctctactaaacatgcaaaagttagccaggcatggtggcacgcccctgtaatcccagctgctcaggaggctgaggcaggagaattgctcgaacccaggggacagaggttgcagtgagctgagattgcaccactgcactctagcctgggcaacacagcaagaccctatcaaaaaaaaagggcagaaaatcaacaatccaggcattcatctcaagaaactataaaaataactgaaaatgagacccaaagtctaaagaaagaaattgttaaaacaggaggagaaaacaatgaaacagaaaacaatagaaataacaaaattggtcctttaaactacaaggctgatcagactgagcaaaaagaaaaggtataaactgcaactaatccttatcaggaatgaaaagatgacatcatgactaatctcatggacgtcagaaagatcatttggggatattatatacaatttataccaatacacttaaaaatatacatgaaaaggataatagtgtagaaatatacaccttaccaaactaacataagaaaaaatcctgcactgttttattgttacaaacaaaactaaaatccttatcacaaagaactgtccacacctgttggctccactagtaagttctacccaagctgtcaggaaaaattaaaacaaatcttacacaaacctatccaaagattacaaaaagaggaattgctctcccaaagttttgtcctcccaaatccttatagggaggatacacacactggaggtacaagccaatgcagtaaggcaagaaaaagaaattagaataaatgaaactgacattatttgtagcttatatgattatgaatgttagaaaatgtaatctgtcctaaaagaacctgtactaagttactgggactcgtgagtaaggttagcaagggtgctggatgtaatagttgtacttctatgtaccagggataaatccttagaaaataaaatctgaactagatcccaattacaatagcattaaaaacgatcatataactgggaataaatctaacaaaaatgtacaagacttcttacattttgttgagaaaaattaaagaactataaaaatggagggatatgctgagctcataacttggaaggcttatgttagaatattgattctacccaaagttgccatagagtcaacacaacctcaataaaaattccagcagattttttgtttgctcgtttcgggaagagtaaagagctgacttaaaattttttaatggaaatggaaagggcgaaggtagcctagaacaagaaaaagatgggaggacacatccttccagacaagttgttggggctgtcctgtgtgctacaggatagtaagccagactcctggcctctacccactaaacgccaggtaaagccccataacctccatatgcaaccaaagctctttccagccactgccaaatgttccctggggggcaaaactgcccccttttgagaaccactgaactacagccattaaaacggtgtcattttgaagcaaagatgattagatagacacttggaacaaaaataatgagcccagaaaaagacatgtaatgtgtttaaaaatcagcttcatggacgtataactctcatactacaaaatccacccagttcatctttacaatctgatgagccttgtcaaatgcccagggtgcagacgcttgattttttattataagagcagtgctgtagagcaggtgccagcatgctgtagcccacaggccttttatggccagcaagctaagactggtttttacatttttaaatggttccattttaaagggttatgtaagtacctatacgatgtcctcaattttgccccttaacctgagatgcctaaaatatttaccatctggccatttgggggaaagtttgcccatttctacagaaacaacagaggaaagactgtcttttcaataaatgatgctgggccaatggggcatctttaagaaaaaagtaaaatgacccctacctcacaccacaaccaaaatccatttgaggtggactgaaaacctaaacaggaaaggcaaagcaatgcagctgggagtgaactgacccccgggtgtggaaagcttcctcgcacatggcacgtgaagcgtgaaacacgggaaagaatgatcactggactttattaaaaataagaacttctgccaggtgcggtggctcacgcctgtaatcccagcactttgggaggccaaggtgggcagatcacccaaggtcaggagttcgagaccagcctggctaacatggtgaaaccctgtctccactaaaaatacaaaaattagctaggcatggtggtgcacacctgtaatcccagctactagggagtctcaaacaggagaatcacttgagcccgagaggtagaggttgcagtgagctgagatcatgccactgcactccagcctgggcaacagagcaaaagcctgtcaaaaaaaaaaaaaaaaaaaaagaacttctgatcatcaaaacatatatcttaaaaatgagacaataaggcagagtctgggaaaggacatttgcagcactcgtatactcttgatgggagtgtacaatggtacaaacactttagacagcaattcagaattactattaaagtcaaatatacatatgcctcgtttttggtgtatgcccatagcagtataggcaggtaataccaagaactctgtacgggacgttaagagaaatcttacgcataatcaccaaaagctggaaacaacacacatgccctcaccattgcaatgagtcaataaattgcagtgggctcctaaagtggaatattatacggcagtaaaagtgaacaaactgcagctagaagcaacaaagccagcgaatctcacaaacagaccaaagaaggagagcaggcaggtgcctggcagcaggaacacgtgtcagccgagtgaccgcactcccatgaagtccaaattcgggtggcactgaggtgcagagttacagtcggttgagggttcctttcagggggcagcaggaagccatgctgggggacaccagagggtgggagggagtcttgtggcaagacaggtgctcattctgccatcatttttttagctggtgttctgtacgctgttgtacttatagtctattactcacaatttaatttttttaaacaaatgcatgcagagggctacctaactgtgtttagagaaggtgggagttctgatgggggcacgtggtaagcaagagttctgctggcagaaggttctggagaaacaaatggcctccttcaaagcatcagtttacagagcgctgggagtcccagggcagtgtttattgagaggagcctggaagcagattctgccagggcaggtgcatggggacccctaatttcctggttctgtaaatttcatttctcttatgtcgaggtttcttcaagtgccgcctcctctgtccattattttagcgactctggggagctgggtaaaactgacagctttacagttagatgaaccataaaaatttggcaacttttctccttcttttgtcgccctctcttagcaactatttaaaagcagcctttctgtgggcaatgcaggcagtgctggaatctggaagaactgttttttggtgcagtcttgcaggaaagctgatagcaattcaattaggaaatgcaaatgaggtcacatatttcccaccggagggctgagtcacccctgaggaatcagagcaatattctggcctcacaggaaacactcgagaccaagctctcacccagttgtcatctgactagctgctgcagcactgaaaagtggcaataggacctgtgggtatggtttgcaaaaaaagaaactgttgtttatgaaactaatattgtatcttctagcacacgtcagcgtttatgaggatgaactcggccgagcaatgtcccacggccaggcgggtccaggcgctgacctgtggactttcctgggtgtttctgtccccccaggtcctttgggctgaactatgtcccctaaaattcaggtattgaaatcctaacctcagaacatgacttaacttggaaatagggggtttgccgatgtaattagtgaagaagaagtgattagcgtgggccctgatgcagtaggactgtgtccttatagaaggggaaatttgggcacagacaggcacagggagaagtcctgtgaagatgaggcagagagctgggggatgccttcaaaagccaaggatcagggaagattgtggcaccaccaggagccaggagagacgcccagagcagattctcctgcacagcctcccagggaccagtgctgcaacatcttgattttggacttctggcctccagagctgttaagggaataaatctctgtctcagcccactggcttgtggaccagagcctttcagccgaggtggagactcagatggcagagtgcagacagaccccaaggcatccccgaaggcagggaggagtgtccccagccaggggtcccgcccagggctccaaatacccctgaatcctcttgatgcagccactcttccctccagggctgttgaggacaagtccccgcccacggcagcccccaggtccctctgctgctacccaggcccttccactgcccctgctgtccccctgcccactgcaggctccacagggcttggggtgtccctggggagaggagggatgaggaacgggtgccattccaagggcagcagcacacaacaggtgcaggcacactgcccggaacaccacacacacggtgcacggcacacacaccacacacacacgccccacacaccacacgcacacacgccccgcacacactatgcacaccacacacacagtgcatgccacacacaccgcacacacactgcacgccccgcacacactatgcacaccacacacacagtgcatgccacacacaccacacacacactgcacgccacacacaccacacacacgatgcatgccacacaccacacacatgccccacacacaccacacagtgcacgccacacacaccacacatataccctgcacataccacacacagagtgcgtgcctgtattagtccgttttcacactactgataaagacatactcgagactgggaagaaaaagaggtttagttggacttacagttccacatggctgtgaggcctcagaattatggcaggaggcaaaaggcgtttcttacattacagcagcaaaagaaaatgaggaagaagcaaaatgaaaacccctgataaacccatcagatcttgtgagacttattcactatcacgagaatagcacgggaaagactggccccggtgattcaattgcctccccctgggttcctcccacaacacgtgagaattctgggatatacaatgtaagatgagatttgggtggggacacagccaaaccatatcaataccacacacacacacacgccccacacacaccacacacacagtgcacaccgcacacacactgccttgtaacaccacacacatagtgcatgccacacacaccacacacacacacacacacacgccccatgcacaccacacacaccatacacacagtgcacgtcacacaccacacacacacaccccgtacacaccacacacacaccatacacacagtgcacatcacacaccacacacacacatgccccatacacaccacacacaccatatacacagtgcatgctgcacacacccacacacatgccccatacacaccacacacaccacatacacagtgcatgctgcacacacccacacacatgccccacacaccacacacacggagcatgtcacacatgccccacacaccatatacaccacacacagtacattttataccacatacatgaatcgcatggacataccacatacactgcacacactacatgccacacacactacacacatatacacaccacacacacacaccacacatttacacgtacgcacattccacacagtacacacgtgcggctacatgaaacacatgcgcaggtgttgcacactcacactgataccaaactcagtctgaaaaagagttctgtgtatggtcagcagcaaaggacccagcacttcacagggttggatgcggccacccaactgcatcaccccaggctcacttggggtgttcaccacgcccagcccgtgccccccatgctcacgttcccactgcagggcaggctgcgccactgtgtccactgtgggccgagctctcatgccttctcctctgcacattctgatgaatcacagacagcctaagagcacatggaggaggtgcaggcttcgttagcgtgaacgcaccccctgggctgtggtgccagagctcagagcaggatgtctggagtctgcatcctgggcctgcacctgagctcctctcaaccctggccaggggctcggcttctccttgcctccgatctgcatttgtatgctgggggctgtgggactgtcacagaatgagaggggttgctgagctgtggaggtggggcccacaggcagctgttagcaaacgtcaggtgtgtcactgtagagcacgtgcaaaggctggagcagggagctcaggagaggcctaggccagggtgaactctctcctgcacaggcctgtcccccactactcacatggtccatatcccctatcccccaggcccatccccccatccccctggcccatcaccccatcccctggaccctccctcatccccgggtccctcccccatcccctggtccctccccccatctcctggagaagcctggatatgaatcacttcttgcccttcaccctgagagcggaggccttgtaagtgaggctggcattgcagggaagcatccacagactgcattcctccgtgagttccccagggctggctggccagtttctgatctgaacctggacacctgagcatttgagaactttaactgaagggggctacaggtcatcagggcagtgaggggatggtcccccagggctctccacatgagctgtttctgcagaaggcatatctgccttgggaaagcaactagaaggtcccgaggtgggggtccaagtttgaagctcacatctccagaaaatggtggtttgttttatccttctcccaaaaggtggccctcaacgggactgaaaaacagcaattctagaataaataaacagcaacagtgccgttggcaaacttgtagacaacgtgtccacctcctggctttgttttgaagatgacgagctattttaatgagtgtgaataacctccacgctcctgcaagttcagacaccgtcaccagcagaggtctggctgctcaggtgcagattccatggcccctgggttcagcagagcgtgtattggtatctccacgcgtgtttctccacatcagaacacagaccccccccccagccccctccagggggctcgagtttcgggggtggtgggccgtcagtattaggtttcatggccgtccaatgcaccccaaaggaacggcagcttgtaactcttcatgggtgcgaaggacgggagtgactattggaattggtcttgcttctttcaggcctgagaagttcaaacttagccagtgttttcaggctgcaaacagccttgaacgacatctgggccagcccttcacttgtaaatagaggggtgcccagggccccaggggcagtcagctgcaggggcggccccagactccccaggaccaggcagggaagccccctagggagcaaaatctgatgggttattggtcattttccccaggccatcctggtgggagaagggcagacctcagtgcagacactgccagggtcactgtcccaagaagatctgaaggggattgagcccgtggtgacctggaaggtggcttggtgaagattcttgctgccatgtggagggtgtcagggataaaagtgggccatgccggcagggaggctctggtcacgtgagccgtggagggaggagcgagtggtacagactctgtgtcacctcctaccccagaggcatggccacaggactggacctgagtggtagccatgcctctgaggaccttggagtcccatgggctgggaagatctggaagtcactgtctttgttcactccaggagtgatgctgggcattcacgtgtcccggcactgctgtgtagcagctctctctaagacttggggacacgacagaggacgctgcaatgtggtccccgccctcaccgagcttaccttctctcggggcaggcaggccaggtgtccatgtggcagatgcggtttggcaaatgctgtgcaggcacattcagagtcaggtgaggggtaccaagccccgggacaggtggacagagggtagaggcgctgtttcatccaggggtgcaggatgttgacatccaagttgagaggtgatgtatgggaagaagccagccgtgaaaaaattcccgtgggaggagtgttccagacagagggaacagcagatgcaaagagccaagccaggccagccccagtcacaacgtaattactcagtgctccactgtgggatgtgtgctctgcctcgggccctgggccctgcccgtattgtggtgctgtggataggctgtacgttctgcatggttgactcatttgctgtctgtcctgacgcaatcggaggctcaagggctttcccagaattgccacgaggagttaggggcagaggggcactgagagagagccccggggtgaatctgcctctgcccacctcccagccaaggatgtctctgatccgtctgcaaaataaggaccacgaggtccgtgaagttgtcctgagggcatgacctcaggactgcacgtggcaccgcgtcccatgtacagtgacggtccccctgagccgtggccactctaaccccagctccatgtctgtctgggccagtcagtccaagacttggcctcctgacgggggacgagcccacctgcccgcctcccctgcaggcctgtgcaggctgggagctgagagggcgcacaggcgtggtgcggggcaggcacacgggccctccagcgtctcagcttctagcacagtcaggttctgcttgggccgttagctctcgactagagctggtgtgtgtgtgcacctgtgtgcatgggtgtacacatgtatatgagtgtgcacatgtgcgcatgggtgtgcacatgggtgtgcacgtgtatgcccacttgtgagtatatgtgtgtgcacatgtgtgcgttcgcacatgggatgtgtgtgcacgcatgtgcatatttgtgcatgcatgtgtgcgcacacacgtctatatacacactttggggagcctgttcagagccccccaagcagagttgtgaggggccagtgctgccctcctgcaggtgatgaaagtaaaactgaaggcagacttctcagaccaatacgtttgtgtttcactccaaggccatggctctcatttaatatttggttaaaaataaaaccctctgtggttctggagaaggattttgtgaaaacagtgagaaaggggtcatggacacagtcttttgtagctggcagaaagattcccagcaagaacaggggtgtctgtgagactgaaacgccacatggtggacgacagatccatgaagccggaggtccccaggggactcttcagaggacatgtcactgagggtctgggcgccagggctctggatggagcgtttatcgcggtcctcaccaacgtcttcccgaatcacacacgctgatggcaccgaccatctttctcactaatgcacaaaatatgaacgatttcattcagttccaccactaatgactctgggaaaaagtaatacattttcccttaacttgctaatttaatttaattttttttttactatgaatatatttttctataaactggagggtaattttgtttaaggtgtttctaactaaacataattttcctgattctctagagcaagttgttctcagccagggcactaggcgagacccgagacgcctgtggttgtcaccacagtggggttgctcgtgagttgggtgcagcctggcatgctgctcagcatcctacagaacccaggacgccccaaacaaagaaggattcagcccaaagtgttaggaatgccgaggttgagaaacctggtctaaagccaggggtgcagcccggccaggaccgaggtcacaagctcggtagcttgtccggatctctttgtaccagaacattctggaacctcctttcttctgctagacagaaatacttatcaacacccttaaagaggctgacatcagaacacacatgccacctgctctcttgtcagccacaattccttatccttctgtatcttcgcttttggtgggaggcaaggctgaagggtagggggagggggtgggtggctttgagatcttcatccagagaaacgtggtggttacgtggtttgtgaggctaattaggaacaacatgaaacccctccacggggtgatggtaattgttacaagttgcctaaagaaccaactctaaactttcccccaggacagcccaggccctcagaagtcatagcccaggctccggctttgcccacaggtgcgcggggagaggggtcccaggactgcagcgtgctgggtgatcctccatgctctgtgtcctgtgagaggaggaacggtgagggctgagagcccaggctccaggggccatggcctgagttccaactggcctccagaggacagcagcatgacgctgggcaggtcgtgcaacctccctgggtaaaaatgaaggtgctggcttcccgcccctactccatcctgggggcactgagcccagacctcggtgcaccgacaccatggcagcaagccatgagcctccctgctgaggctttccttccaaatggacacagtgaagaaataactgcccgactgtgttcaggaaacctttccttgtattatttctatgggaattttcaaaatgatgtcgcctttttatgagagatcagaagtaagaaattcggtggtgctcgtggggcagggagagtgggtttggcccctactggtgtcattgatgtaagaaaaaaatccactaagtgccttttcggaatgaaactcatgcaaatgctgacttacaatggctcacatgttctatttgtgaaagaatgtagatattgttctgttgttttagtgtgtgtttgttgaataccattttattccgtccatccttagctaccatggaaaccagctagaaggctgcagacaatatcctagttaaatattttaaatatacatgttttcggggaagcaaaatggaccctttctcaaaggtacaccgaaaaggaaataggaggtagaggaatgaactctgtgtaggatttagggcacccccttttttaaaagaaatctaatcatcctcagtaaatatccgtactaggtttgacatttaggggaggggggctcacataatttccttttgaagcatgtttaacccaaagctataaggaagcaatgagaacaggaagactgcgaatcagagagattgaaaagagccataaatagaattgatatttggggaagaaatcgtatcctccctgttccaacagagcaatgtacgttcataatgcaggcatggccggtccttccccagatgtttcatttccacggcagactcctatgcaatcgatagtcttggagcactagactctaagacgtggtgtgtgtgtggctggggtcagccacatatttacccaaacattagaacgttcagcaaaacaggagccgaaaatgcactatgaggtggtgccatgggtccgtggtcactgccacaggagaagctgccaacacccgggagcctgaggctagacaaagtcaaaggccggtggctttggggacagaggtgctgggtggctgggactgcagtgcacagaggggtgagcgcggattttgttagtgaataacgcgcagaagacgccgtggcctcagcagggctccgggacctacatagggtttcagagctcccagaaccttccatcctgagagtgctcttctccctgcatccccagacagagcacctttcctctcacaggaagctccagtgcatggagcatcctcataagccatgccgacagctccgcacagcaggcagctccgcacagcaggcagcgccgcacggcaggcagctccgcacagcaggaccaggttagagggctgggcgcaaggaaaagctgcaatgctttgcctttgcagccagtccagcctcaaggccaccccagggcccacctggctctgctgtggggataggccaggaggcaggagctcccctgcgctgtttccctgggccatccagtctgcaggtggtggacttccccaagtcagagtaagaccgtttcgtaggcactctctagtgacacctccgagatctgttctgtgcccatcaccattctacacagtcacgaggcatgttggaaacagaatgaaatccacaagttagatgcatcttatgcctgacgtgaccacacagcgggactggccagcatctggtatgtaaaaaagttctgctctctgagctgaattctctcatgatgattaactttctcattcacaccaaaaaccatcttcaatacccactgttcacccacatttccacttctggagacatttgccacctctatttttatcttcacagaaaaggagggctctgttttccccacatggctcacaggggtgtgtggagcagatccagcagaattcccagctcggggctgttgcaaatattcttctcttccttggtggaatggctcccactgcactctgtccagcctggaagacaaggagaggcagcaaaatcagggaagtgaagaagcacaatcccctctgtgtcctctcaccgttccttgacactgggtctagtttatctgcttatacaaatcggacccccaggctctgcagctacagaagccttgtctctcagcattgcgggttcacagggctatgctgcctatcagagaaatccagtggcatggggacctccccaaagagccactttcttgggtaatgagagccagcagttacacctttccaggagggggacaggtgcaccccaacaagctgacacagagcaccttgaccatggcaacagccagtacggtgaccagaggtcatgtcccagcagaaactgatttgaaaacattcccatagatgcttttgtggaatcaggtggacttgtgccatgccattttctcaacactgtggggcacttcagatgctaaggacatgtccagcaggatcagtgcaggacctggccgctgggcgggatgacaagtgagggatgccaccaccgccatctgtgacctatcgccaaaggtcggggctgccggcttcccttagaaatataccacggatctggtgtcagggaatttgaagcaatttccatgtttttgccatctcttgagggtaatgacttcgactaggacaagggatgctcgctcttcctcactgaacttggcaggagcatcagatggccccccacaactaataacccatgctcagggaacccaggccctgttcccctcttccatctgcaccacgctggggttttgatcaggtccaccccatctcagcccatctattcaagaggactgctctggcatctgtgcctctgggaggcattttcacgcaatggctacggcactgcggagccggtgctcagttcaggattcccagggagctcgtccaccctgcagagagcctcatgcaatgtgtccagagggtctggagtgggacctgctatctgcatctctaccacaaggaaatgttacaatagttgatcaccattcacctgtgaaccagctcccatgccccggccagaccacgattgtggggaaagacccctcgtcttccatggaaggcactctgggagtttctgcatggaagccgggtcttggtggctgccctcccccatgtggcttcacctctgagtgttttagcattcccttcacttaaaagccagggttcctccttggctcttcataattcccggctcctaacagatgcgtggattcgagaataaaaaatataacaaatgataacttttcgcatgtagcttgggaggtgcatatgattatattctttccttaacactgtttttttctttttcaaaaaaacagaaaaagacgatcatgtaaagcctgccccaggtcagttttgcattctttgtctctcgcttgcgagtgatgaggggagggaaatgatccgagttttgctgatactgagctgtccctggagacctcaccttgcagccacagccagttacagcctcatcacacagacaggagagcaagacccaggcggggagcagggctgccaggagcttaagaaaataaaatattgtggccccaagaagccggcagggcagaatccggccctggggagagcacaggccgccgcagggtgcaggtgtggacttgggggctagtgtggttttctcaacatgcaccttgcccgtgaaccccggggccaccgacttccagtcgaacggaagttgtctttgtctgtgtgccttccttttgtctcttaagctcatttacctctcatcacttcccctgaatcacaatttatgtattcttgaatgtgagggattggtgactgtatccctgggaagagagaggatgcctgtatttgagattggtccaggaagcctgtacagagagacccggggctggagaagagttcatccagaaagaccatgagaccacccagacccctcgagccatgggtggagagtgaacacaccttccgcgcagggccccccgagcagcccactggagcccaggctgtcattttatctctaaaaagccaagctccacttatgcatggggctttgtcgtgcatccgccccatcagtggcagttttgcagcaccttcctccccagatgtaaagtgaagcttccgctccccaaggcgccccagccttcggcttctaacatcactcctatccccactgctgcccacatcccaggcatccacgtagctccggagcacagagctcaccagccccttccatcagcagggaagcctcatgcaggtcgcagggcccagcactaggacccgtgcctggaggcttctgctgctgccgcctccgtaaatcaccatcttacagtaggatcagcagaatgcattccataggaagcacagttgattagggcttaatggggagaggcgatctgaaatgagaagcactttgtaaataaaagctgattaagaagcaggcaggtttagagtcacctgcaccttgtagacacatccctgggagcctcaggcccccacacccttcatctgccccctgaggaaatggccctgtccctgctcagcactgggcaggtaggctctgaccttggaaactgggcccctagacaagttcatctgctgccactcctggccgctcagggctcggaggggtcccgaggatggacctcccacagcctcgtgtaagtaagaggcgggagtggtgacaccatttaccaggcatctggggcacactgctccaggctctgatgatgccccagactgcagaatctccccacccctgggctctgttcgaccgatggaccaccatccccagccagtcaatggctgtacatgatactgaggccagggactcaccctggggtctgtcccaggaaaggtagctgaagccacgaagccacagttgtggggctcacagatgtcatctgcaaacagacaggccgggctctcagctcagctgcagcagagcagccttagggcgtaaggagagcagggaagaggaggaggaggaggaggacggtgtctccaggttgctgtccaggccaaggaggccgagtgtgaacagactctgaggagcctgtcctggtagggaccagcctgggcgtggcacatttcaggaacagcaagaccggggccaggagtcaggaaggggaaggcaggggctgacctgggcggcctggaggccaggcccaaagccccaggtgcctgtgggggcaaggggactggcagggctcccaccctcccatctcaaaccctcatccagggaggagagcccaccccttccagcagccccgggaaagtcacttgctggggtcacctgccttccctggagcagtcacctggccaggtggaatgccggactctgattggccagctggacccttaggcccacccccgcgcctctgggattggctcccaggaggaaagtatgggtagggtagagggaccgcggatgctgggcccagccctgggttctctaggaccccactaggccacccaggaaggagcctgggcccacacctccctccctggcaggcccctcggtctgggtccaggagcccactttgctcacggtgccctcaccagagcagtccctgaccctcccctccctaccccaccctcagtctccctcgccacttggccccagctctccctagccaggcaatttggacaaattcttccactggcctgggcctcagtttcccttcctggaatataagggttgtgggacaccccgagttcgcctgccccccagccctagcccctgaacactcagagctcatcctaggccccccttggcccagcctccaggctgcaggagtcttgccctctccttctctgccctctggaagtcctgcccagcttttaggagctccacccccagctctgccccttctcaggtttcttccgacagcagggctgaaggtccccatgtctgtcaatgctccctagacagtaccacattcaccccacacctggcaggggggcttcctgatcatccccctttcacagatgagggactgagatcggggatgaaataaatcctgacttgagcagtggagagaaaagccatgctccacgcagctctgttaacctcggagcctgtgacgcccccaccctgctttccttccaggccccaaataatggtggtgtctgcctggtttctgaggcatccacactgtcctgtgccactgtctgtgcccccttcctggcccgtcctgcctggcaaagtcctattcacccttcagtgccctgaccgagatataatacccaccatgagtatttctgtccccaagtccccagtggactgattgtgtgcgacttggtgccagtttgaacctcctgcctgattctgactctgcaccaatcgtgggccctgtgggaagtggtgggatgggcccatcaagatggtgggccacaggtcagacagcttgggctccagtcctggccttccaagcttgagcggggcttcatcccttgagcttgatgtcctctgtgtgctgccctgaggactaaatgagactgtgtctgggaagtcacttgggcagggcccgggcccgtgcaggactcaggaaggtgtccctgaggtcatggctgcaccccgcccccacatgagcatgcaggagacaggctgagggccatttgctttgtcgtctcctggctcaagggtggcatcagtaactttgtgtggatgcagtggcttaagtctgtccactgagtttgctccatagaaagtgagtggctatcagggccctgctgcccccaccggggctgtggtacctccctaacgtgtgggactaggaaaagatgcacagcccccggggcagtagcaggtccggggtggcaccagagcaggtgttccctgccgtgtggagtgtggcctgccaggtgaggcgctgtagattgagcctggcatgaggatgaggcgcccaggcagagagaggggcaggagcagggccttgggcggtggaggtggaggtctggtccccagcacctggcgggtgagctaaaaccctataggctggaggccagagtgggcgctttgggccgctcctgcccactgtcctataggcagggctttgagggagctgagagtgcatcagggagcccagtggggctgaagcagggcagagtcaaaggcacagggaagaggagggagcacaggaggggaactgtggggtatgggacactgcagccctgggcagggccctggccacagggccagtttccaggcccagaaacactcatgggagataaaagtaggaccacagcccaggtctcatcctgtcaaggacggctccatgaaacatccctggggagccatcctgcaggctgcagcagctccgggaagctgccccctcatgcatcttcccaggtgtccgtgagtggatggaggcgacagtgggcggctgccttggagctcctgattctgcagatctgcaggcacgagcttggttggaccccaaagaccagctcagccaccaggaccctcctggacgctgctagttacaggacttctagcttgagctaaactgtcaggatgcggggagtgggtacggccaagatatcttgctgctgggctgttggttttgagaaagttgtgatgtgctctatacacacacacacagacacacaaacacacataagcaatgcgtacctgtgcatgtgtagaatgcataaacacacatgtattcatacatgtgcatttgtgcatgtgtgtacatgtagtcatacacccatacatctgtgcatatttgacgtgtgcattcatatatatctatatgtgcatgtgcgtacatgcatgcatacatgtgtgcatagcgcctgtatacacatgtgcgcatgtgtactatctagtttctggtaatggtgtagtagaggtcacccttaagtcattacccaatgctcagtcttcattcactccgaaatacagaagaaaaacaggcaccagggaaaatcagcaggtgtcatctgttagaaaatatttttaagtgtaactggaagcattattttcagtgagtataattatgcatcagtgtttatgtgatgtcttctgaatgggcccaagatgactgcgtgttcaaaagaacatgcttgttcgaccagggtgagtgctaattgtggttgacattttcttccagggaagcgggcgcatcttccaggcagaagcccgcacaggtctggcactgattttcaccagattttgttattacatttgtctcacagctttaaaatagtagcaaatatgtgcaatttatttaaacaacactagggaaattaacgccatacaagctcatactaagcaaatgaaaatgaaggatttttttaaaaaacggctgtatggaaaccctttaaaactcagagtctgagattcagagggccctggtgagctgctgctggttctgaagcaccaccaggcgggagagaccagccagtctctgcctccgtctcccgctgggagatgcgggggagctgcagatgcccagagggcccctgctagtggctgtgccagaggctcccctcgccctcatctgggagagatctgtccaggctgcctgccctcgtgcaggcacaaaaataatgctccaccacccttctccagaggtggatccccaattgcctgtgggctgggagacgccctgttctccaactgcagaacatatcaggcgtggttggcggccccaccccagagttgttaagtcttaggtgagacctaggaacctgcattcctaatgagctccacagggcactgagctgctggtcctgggaccagcctgggagctcagacctgtttctccccagtctgggatttatggaacacatcccgggtgggtgcaggaaacatcactgagacccccttttcccttggttccccatctgttccatgggaagatcgatttccgcccagtccaggaccttcctgaagtccagcaaaggggattcgacttcacaaacagagaccacagaagggagaggtggcactttcaggtgctctggccttggggtcacactcctggcgtccgaatcctgcctctgctgaacgggctgcatgggcttcatgagtgccttggcctcgcatggcaggaaagtgggaatgatggtgctccccgctgaactggtgagagggaggacttatggggagactacctggaacagcatttggcctggagcctggaacctgagtgcacgccacatctattaccattgttcctgtgggctatgttggcgttatttcaagccactttgagcagtgggattaatctggtctttctcatcaaagcttagagcatatcaacataaattgtcatatccccaaggtagagaccagctcccagggaggtgctatctgtctggggctaggtcttggaggacaggtgggatgtcttcagtggaagggccagatgcagagtcctgctgtcctgctcatcggacattcagtacctatgaggcacaggctactggtctgggcgaggaaagcatggagtccagttgtctgtgctgggttccggggagaatgtgcagctaggactgtcctggaagctctttaaaggcccctgaggagcctagaaaagcccccgccccttgtcatcatgaggggctgaagtcgagacccctgggtctccatgtttgcacctcacatggctcctttctaaggaaggctgggagcgccccatggaagcctcctgggttttattaattgaggcaaatggtggtgtggacccccactgcctggaggggcagcctgtggtcagatgcctcccggccagctttgtcctccctgccttgggctgccctggtgcaaggtccattctccaccacgtgaactctcatatcctactgcctctgcaattcagataaaatgagcatcaaccacgaagactggagaggcatgccatgccatgtgggcaccctgcactggccccgatgtggcagacgcatggacgccgcatatacgcgtgacgttctgttggcgctgtcagccgcaggagtcatgtgcactatcacgtttaggaaacacagaaagggttcaggcgcggtggctcacacctgtaatcccagcactttgggaggctgagacgggaggatcacaaggtcaggagatcgagaccatcctggctaacacggtaaaaccccgtctctactaaaaatacaaaaaattagccgggcgtggtggcgggcgcctgtagtcccagctactcagggggctgaggcaggagaatggcatgagcccgggaggcggtgcttgcagtgagccgagatcacaccactgcactccagcctgggcgacagagcgagactccgtctcaaaaaaaaaaaaaacacagaaaggtaaaaggaaggaagtaaaatatgataacagaactccctggtgaccagagaaaaccagtgtgtgcattttcatgtattttcttacatttcttttttctttttttctttttttttttttttttgagacagagtttcgctctttttccccaggctggagtgcaatggcacaatcttggctcactgcaacctccacctcccgggttcaagtgattctccggtgtcagcctcctaagtaactgggactacaggcatgtgccaccacacctgcctaattttagatttttagtagagatggggtttcaccatgttggccaggctggtctcgaactcctgacctcaggtgatccagctgtcttgacctcccaaagtgctgggattacaggcgtgagccaccacacccaggctctttttctatcctttaaaaaaatgcagttgaggctgggcatggtggctcatgcctgtaatcccagcactttggaaggccaacacgggcggattaccggaggtcgggagtttgagagcagcctggccaacatggcaaaaccccatctctattaaaaatacaaaaattagccagatgtggtggcggtctcctgtaatcccagctactcaggaggctgaggcaggagagtcacttaaacccaggaggcagaggttgcagtgagccaagatcgtatcactgctccagcctggatgacacagtgagactccatctcaaaaaaaaaaaaaaaaaggaaaaaatgcaggtgcagttgatgctgtatgtatgctttggtgctatttctccacttactaatattttatgggcatttcttcatgtcagtcttaaaagagtaacttttaatgattataatattccaagacatgaacacagtgtaatgcgtttagaattcactgtcagacattcagatttgtgctctggtatttttacttgtttaaaaaacatccaaagtaaacatctgtctataaggactttggtccacctagagtttcctggggacagatttccagctgtggagttactggatcaaaagggaccgtcctttttgaggctcttgatagtcactggcaactgggaggcagagggctgtgctgagtgaccgcggggacccagcagcaggagctgcatcagtgtcagtcctgacagcctgggccctatgctaagcatgggctgggcattttctcattgtcatctgatgtcattcccatagcagtccctaaactcagggccattgctactatctcccttctgtcagagaagaacccaggattgtgagagatgaaggcactttgccccacgtcacatgagcttttgtacatacacacaggtggggtccaaggccaaatcccacaccctcagccgtcagcctccgcccactgactcccatcagcctccacccactgactcactgcgcacccccagtgttgcagatttatttcgctcagccttgtcaatctgacaggtaaaaaggatatattacttagatatgcattatttgattactgggagatgtggatatttttcataagtttattgatcatttatatttgttttgctgtgaattatctattcatgtccttttcttgtttggaaacaacattccatttgatttttttatttctaagagtgctttatatggtgactattaaccttgtgtcaaattgttgtaaatcatattttccaaatgtgtcaattgccttttgggtctgttttcataaacaggagttttgtgggaaaacgtattagtcttttcttttgtgatctcttgcattgtttggggtgagcttaaaaagccctgtctacactattggtgacattgtccactatattttcttctttgtttatggtttctttttcccgcatttaattttgtaatcggtctcatcatattgatgggggtctcacttgatttttttttttccctaatagttcctttcccagcgttatcccgcccttcccgcttagctccttgtcccagcgttacccgccttccctctcagtctcgggcagtacagatcatcttagcagatgccattttcctctgtgcaaaacctaactggacttctctgcctcttctctcccctttccaaataaagccgcagaaaggaaagaaggtcgtggctctggacccctctccgcctccgaaggacaccctgctgccgtggccccagcaccagaacgccaacgggctgaggcggcgcaaacgggactgggtcatcccgcccatcaacgtgcccgagaactcgcgcgggcccttcccgcagcagctcgtgagggtgagtgcagacccctcccgcgggcacgggggtctcggcgttagcagtaggctcttctcccgacatcccaaagccaggggcgggttccgcgtttggtgtctgagaaggtcgcgatttcaccctttctgtaatgagataagccttacacagcgcgatgaaaaattcaggcggggaagctgcgtcctccgcggtggatgggcctttgtgagttaggggtgatttctctcttggttactttcaagtggctgctgtgtgtgtggaagcagtgggcaggggcgtgggtcgtggcctttgacctctgacccctttctttggtctgatcacatttctttccatggatgactaagatcccggatgatggggtggtgccatgacgatccctgcgccgaggccagcgtgcgccgtgccgcggtctgtctgcaagttcttggtccccgagctcccaaggccacccgagattgcttttaccgcagaaataatttattttacaaatttgtgtttctattatcaaggccatcaacgagcaatttcttcttccctttgaagaaaattgcagcccaatctgagcaacaatttgataaaaggatggcgagaattccattaaataattcccaaccgttgtggaaaagcctcaccccaccctttggaaatgagggtccccagagtgtgcttaaggggtcattctcattctttgtgctgtttagtgtgttttgtttctcattcctttcaatgcagaaggctgggctgtgcgtttggaatgcagagatgggaggaagagagcagccaccaggcagggtccccccaattttttgtatccctaacctcggccaccaggggaccccaccagggagcagccaaaatgaccggttatttatagcagaaactctggcatgagtgaatgcagtgtgcctccacaccccagccaaggtgacttggttgcaaatgtatcacctgccttctctgcacagagccggccctcccacctcagcacccagcctctgctgcattcttccctgtcaggggctcagctttccttggccacccatgccccttgagggccaggcaggtttggagattttcctgtgaaatgcagttcagggcttgaaggaagccaccaggggttggaaccccatcctgggcgagcttcccaggcccacatctcctgggcccactgggcaacctcccgcccaccacggatgctagagacgatgccaatggcagtgccgtggcccccatgctgcgcccacctcaccatccttggggccgggatttcttgcatccggccattgcttgtgttgtcattgacttaaaattcgtctcaaagtgattcattttttttccaacttttattgtaagttcaggggtacatgtataggatgtgcaggtttgttacctaggtaaacgtgtgccatggtggtttgctgcccctgtcaacccatcacctaggtattaagcccagcatccattagctattcttcctgatgctctccttctgccccacccctcccacaggccccagtgtgggttgttcccctccctgtgtccatgtgttctcatcattcagctcccacttataagtgagaacatgtggtgtttggttttctgttcccactttagtttgctaaggatgatggcttccacctccatccatgtccctgcaaaggacatgatctcgttcctttttatggctgcatagtattccatggtgtatttgtaccacatttgctttatccagtctgtcattgatgggcatttgggttgattccatgtctttgctgttgtgaatagcgctgcaatgaccatacacgtgcatgtgtctttataagagaatgacttctgttcctttgggtgtacacttagcaatgggattatggatcaaatgggagttctgcctctaggactttgaggaattgccacactgtttatccccaaaggagattgtataccaaaccacagtttgatcactgggatagtttgtcaggctaaaagctgactgtagagaaaagcataaggtgagagaacaaaggctgcccctgatttgttacccaggccagtggggcaggggctgaagggtgtgctggaggcatgaggaccaaccagagattcctctttgaaggtcatcaggactgaaggtcaccgagacagggagcgggcttccatcatgctcttccaccttatttaatgccttgtgcttctgccacccccacattgcccctggtagacagtcatcgatcttactctggggtcagcaaaccttttctgtgaagggccaggtggtaaatattctaggcattgtgaccatacagcttctgtcgctgtggtgtgaaagcagtctcaggcaatgtgtcaactaacaggttggccgtgttccactaaaactttatttacaaaaacagggagtgggctgggttagcccatgggccatgatttgacaactgccaatcagacacttttccgaaactcaagaaagggctgcccaagccaccctcacaggcacagggtaggcacattatttgtggagtgagtgagcagtgaatttgagggccctcatctgcttgcacaccacagagtgggtaccagcggcatctgactgttatctctgttatcttagcacaactgggatattctgctgtcctggctcttggagtttctcagcctgatgatctaggactgaaaggtgggaatttcttcctcagctctgctccacagataggcttgtaaaagggaacatgaaagagcgaggtcacatgggcacagcccctgtcccaggagggtccccaagctgtgtgtggccccacacaccatctcctgatggacagtggagagaaagacctcctgcagcatcagtggctgaggaagtgtgggctgggacaggccccatgaaaggaccaaatcctcccagaccagcagagggctcgggtaaggatgggcccagttgtcctgttgatgagaacgtttctccggaagacatcatcatgagagcccaccttacgccacatctgaatgccctgatggggaacatggctttccaatttgcagcagggaaatatgccccttctgattaacacgagcttggaaagtgtggctgagagagcagccggcaccgggagctctccaggccctgcaggtgcagcctcctgaggactgtctgctgctgacctttctaaactagaaatgtgcagggaggaattgtgaatttggctttgggtgtcagaatgagaaaagctgcaaattccgtgctcccaggaaaccacccccagcatctccgacccaggaagtggcagcttctcctgttctggggtctgtggctttgctatggtttggaaccactttgtcatctgctcctcatatcccctgactcgtccagcagcccctgcaggcagggtcacctccatgcccagaacgtcactgcagaacaggccgtgagcggaaggaggcagtgaggtgggtgcgtgttagggctgacgagctgcactgcagcatttcagaaactgaacccaacctaagtcgatttcttgctcactgtgaaggttggtgggcagggcgagggtggcctgtgctccagccattcagccacccaggatgagcgtctcgggactggcgaggcttacaagtggcatacgtcaatcgtgcctacatgccactggccaaagcccagtcacatgaccacgtctaattgtaagggacatggggaacgagtccaactccgtgtcatgaaggagggggaaatatggttggtgaacagctggtctctgtcgaagcaggtttctaaagatgagatcagcctgtgtcctttcctccctgatgaacccactgtcccaaggagtccctagtcactggagccctgggtgagcagttcagatgtaattcgccaaccagatcattctttaccctctgccctgcttcagttcgccatagtgcttggtgtgaactggctgtattttctgtctttattcacctacttacttcttctctaagaggaggcttcctgaagacaaggatcttggctgtacccctagtgttgtaaacagcccttggcatgcagtgggcactctatttgttgagggaatgaatgagtgagtgagtgagtgatagacgtgatctcagtggtgactgttgtgctgggcacccatcagctaaccctgcaaaatggcccagcagttggaatttggcagaaacgttagcactgcctgtcctggctctcagagtccctgcaagtatcgctgtggctcacacaggggcatccccttcagcttccatccaaaggaaggcggagtgggcatccaaaccgagcttaatgccaggaaagatggacctttagtgaacggaaaatggaatttccattgtggcttctgtagatttgccttttccaaatggactccaagtcattatgtaagaactcagtgcatgtgcacacacatccacatgcgcacacacgtgcatacaaaaacacacgtctacacacgcacacacgtgcatacaaagacacacacccatacgcgcacacacgtgcatacaaaaacacacacccacatgcgtgcacacgtgcatacaaaaacacacacccacatgcgcacacacgtgcatacaaaaacacacatccacatgcgcacacacgtgcatacaaaaacacacatccacatgcgcacgcacttgcatacaaaaacacatccacatgcgcacgcacgtgcatactatacacacatgcacacacgtgcatgcaatacacacatccacatgtgcatacacgtgcatactatacacacatgcacacacgtgcatactatacacacatccacatgcacacacacgtgcacactatacacacatgcacacatgtgcacataccactctgcttcacacacacactcctacacgttcatgtttgccacctccctccctccaccctcccctctatcttccattgaattcttatctagcacaggcagtggtttgtggggtgctttcctgtccccatttccatctataggaagctgatgagcttcctggcagtgttgtaggggagacggctcctggaagaagccccaatcacagagacggtggtgaatgcagcctgatgcggggcggcaagctgagcacagagcgctttgaggttcagctgggatcagctgcagttctgcgctcattaaggcatttcattctgataaaatatgttaaacgaaaaaacgagcgggagaggaggaggcagaatactcttccccaaaaaaagtctgttaattacaggctttttccttggaaggaatatcacgtctcttcctaagcactaacggcaccacgcagagggaaataggtaacctacttgtagagaggaaagccctgaaaagcaaaggggtggctctaattggcggggctgtggagccaggggtatctgtggcaaagcagggagccacgcctggtggttctgccactggaatcagaccgcagtctaaagtgagtggtgagtgaggaggtgtacccacaccgcggagggaacactcagaaccccaggctgtcccttcttctcaagcagaggagggaggaagccgctcacagttaccgaactgattttccaggaacttggatagggacttttctttatgtccccaggggaactggggaaaatggcaggagggagcagcatttaaaaggttagcaggacgccctccctggtccagaattctggctctggactggacagtttgggcagttgctatggtgccaagcaccatgcgggcactggggcttcaggggagagaggatatagagctctcctgtggccttcaggaaccaccaagcaatccacattctgcctgaagttcacaacctggtccctcggcccttgtagggctggtacctacacaggcacattcttaaagggttttaaaacgccacttgcttggctagcatacacgttaggtttgactcctggcgagattcagaatgaggataaaatgaaacttttaagaagagcatctattgcttggctgagtctaataccaatgcacaatatgttcccttgagaggctgtccagggcaactgcaggaatcagcgaatcagctgaaggtgatgagggggaacgtggtgctcctgggtgcgaatcctttcattttggcagttgatattttagaagacaagaagtcatgcaaaccctcgggcccccctgccagaggacaagctaggaaaagagctctgaagacaaggctctggagggaggtcgctccacagtcgcggagcctgcgaggtgcttaggtcgctcggaggagacacacaggagccatttccagagaagcacaatcacaggtgcgcagccacagatggctcacaaaggatggctcaagtcagccccctacaccgaacaactcaaatgagcttaagcggattgaagtgcaacgtttccttcacgtcttctggataaattcggttcccatttgtgcacatacaccccattgcttcacatccagccacaaatacttacaccgttctatgtgaacagagatgggctgggtctttgggagcatggaggtgaaagggcacatggctgccctgcacgggctctggactgcttcagcaaatgagtgatgccccgagctgggtctgcatcccgagatgcacggccaaggtgccggagacccctctctggcccgtggcaggggccccataaaagttgattggatgtgtgagcacgtgtggcggggccagctgaattttagccccacgttatctttacagaatgtttgctgggtaacttagcagtataattagcacggagtccacctaagcacccactttccaatactctaaagcatccatgtgtgtacaaatgactcacgtggcagtcattcgttgtctcatggaagcagggtggcctttccaaagcacggatgtggctgtgtggttcccactgtccttgggagatggcctgaatgctcaccttgccccacaggtttcatgagctcatgccaccccttggcacagcaagctccagttgtgctggtggctcgtagcttccagactggctcgtagcttccagactggctcgtagccttggtcacctgcagtcctgtgcacaagctcccccctcagcctggagggttttcccggtgcacccaacactcccctcagcccggctactccctacctgctctgagaactccctacttctcaggacccatcagaggccttcccaaggggccagggcacccactttgcctgctactgtggcagagtttttgacactgtttcgtcggtaattattgtctgcaccccccactaaacctaaagctccttgaggagcacacatgtcgttaaacactcattaagtgagaatgacggacacggccctagtgcctacctctgctagtcagcccttcatggtcattaggaagattgttacgttagggatacagtacctggcaataataaattggaaggtcttttagtaatggtggtgtggtttatttcattctaacactcctatcaataataactataaattctaggggaaaatgtttaagctctttgaagttacttgggagaaatggatagtagacagaatctgttggggactccacgctcgaagggagaaaatggcactgggtgagacgtgtgtgcaggtggcttccctctgagggcaccatcccaggccttgcctcaaagggtgagtggatctcaggcaggaagccacagacgtgctggtcacaggagctgtaagatggagtttagaattgacaaagcagctggaatgtgaggggataaattctagaaaatacatagccacagatagggactccccagtacgcatgtaagctctgcccagatccttggctgccccggaaatgtgcatgcacagagaggcaccgaaggacccagtgaaagcaacagtcagcagacggaaagaactaagcagagattccaggggaaacacattgagatatgcctccagccaagtgaactccctgctgtaatgaaaaataaacaccctcagggaaagataacagaaccagggtctctacaaggttgcattcacagtgatcagtatacacacaaaaattattagacatgtcaaaaagagagaaaatgtgatccacaatcaagaaaaaaactgcccagagaaaggaacccaggaaccctgagatcacccagacattggaactagcagcaaggcctttaacataatgctttatagtatgttcaagggtcagaatagatggatagatggatagatggggaatcacagcagaaaaaaaaatttgatactctaaaaatataaccaaatagaaatgataaaactgaaaagtacagtatctctaacggaaaactcactggatgggttcacaagtggattgctgaggcaggagaaagggtcagcgcatttgaagatggatcaatacaattatccagcctgaagaaggaggagaagtgaagcacacagagcttcagtggggcggtggccagtggcctaacatctgtgtgatggcaataacagaaggagaggagagatgatcagaaaaaaatcctcaaagaaataatgattgagactttcccacatgtggtagtgaaacaaacttacagattcaagaaacccagtgaaccctaggtaggagaaatacaaagaacgccgttcaccgatcatagtcaaactgctgaaatgcaaaaataaagaaaacatctctaaagtagaggaaaaggtgcaatatgtccggggcagcagtcagaatggggtcttctcctcagaatccctgcaggcacacgccaacagaacaacttctttaaactactgaaaagaagctaccaaccaagagttttatatccagaaaaaatatccttcaaaaatgaaggtgaagccgggcatggtggttcacacctgtaatcccagcactttgggaggccaatgcaggcagatcacctgaggtcaggagttcaagaccagcctgcccaacatggtgaaaccccatctctactaaaaatacaaaaaaatcagctgggtgtggtggcacatgcctataatcccagctactcaggaggctgaggtgggacaatcgctcgaacctgggagacagaggttgcagtgagccgagatcacgccactgcactgcagcctgggtgacagagtgatactctgcctcaaaaaataaaaataaaaatgaaggtgaaataaagacattcctgataaacaaactgagggaattcatcaccattagatccagagggagtgataaaggatgttcctcaggccagaaacaaatgacaccagttggaaatccacacctccaggaagggatggagagctcaggaagagatacatttatgggctaatataaaagattatcatttttcttttaatttcttttaaaaagctgactatttaaagcaaaagtacagcattgtattagggagtttataatgtatgttgatgtaataaatatgacaacagtaggagaaaaactaagtaagacaacagttggacaaaggacagacggggtaaatggagcaaggctgttttgaggttctgacgttgctggttaagtggtccaatattaactctaggtaaactgtgatgcttatgaagttgagatgagtattttcattagttaagttaatcaaaatgaatttctttaaggctgggtgcagtggctcatgcctgtcatcccagcactttgggaggccgaggtggacgtaccacttgaggccaggagttcaagaccagcctgaccaacatggtgaaaccccatctctactaaaaatacaaaaaattagccggccgtggtggcacatgcctataatcccagctactcaggaggctgaggcatgagaatcacttgaaccccggaggtagaggttgcagtgagccaagatcatgccactgtactccagtctgggtaacagagtgagaccttgtttcaaaaaaaaagaatttctttatatatgcgtcaatgaaaactgttagtcaccagattgtcccgtttattagcacaaataagtgagttttggatgtgcccatctatgaaaacaaatacaaggcgtcaatgattctgaaggcttcttccaaattcattacccaacattctatctgaacacactaatatacatttctagggtcgatggtttaaactgtaaattctccaaaggcacattctatatgatttttgcccacaacctttccttaatatgtacatgttttctagataaaaacattaaatacagctaaagtgacatcaaggtctccctcccttcctttcctccaatacgtgagagaaatgtaatcccagttccttgggacagttctcgaggccctcagatgtcctgtgcccccgaaagaaatgtaatcccagttccttgggatagttctcaaggccctccgatatcctgtgcccctgggagaaatgtaagcccagttcctcaggacagttctcgaggccctcagatgtcctgtgctcccaggagaatataagcctagttcctcgggacagttctcgaggccctcaggtgtcttgtgcccccaagagaaatgtaatcccagttccttgggacagttctccgggccctcagatgtcctgtgcccccgggagaaatgtaagcctagttcctcgggacagttctcgaggccctcaggtgtcttgtgcccccaagagaaatgtaatcccagttcctcgggacagttctcaaggccctcagatgtcctgtgcccccaagagaaatgtaatcccagttccttgggacagttctcaaggccctccgatatcctgtgcccccaggagaatgtaagcccagttcctcgggacagttctcgaggccctcaggtgtcttgtgcccccaggagaatgtaagcccagttccttgggacagttctcgaggccctcaggtgtcttgtgcccccaagagaaatgtaatcccagttcctcgggacagttctcaaggccctcagatgtcctgtgcccccaagagaaatgtaatcccagttccttgggacagttctcaaggccctccgatatcctgtgcccccaggagaatgtaagcccagttcctcgggacagttctcgaggccctcaggtgtcttgtgcccccaggagaatgtaagcccagttccttgggacagttctcgaggccctcaggtgtcttgtgcccccaagagaaatgtaatcccagttcctcgggacagttctcaaggccctccgatatcctgtgcccccaggagaatgtaatcccagttcctcgggacagttctcgaggccctcagatgtcctgtgcccccaagagaaatgtaatcccagttcctcgggacagttctcaaggccctccgatatcctgtgcccccaggagaatgtaagcccagttcctcgggacagttctcgaggccctcaggtgtcttgtgcccccaagagaaatgtaatcccagttcctcgggacagttctccaggccctccgatatcctgtgcccccaggagaatgtaagcccagttcctcgggacagttctcgaggccctcagatgtcctgtgcccccaagagaaatgtaatcccagttcctcgggacagttctcaaggccctccgatatcctgtgcccccaggagaatgtaagcccagttcctcggaacagttctccaggccctcagatgtcctgtgcccccggggcctcatcagacattaagcatgcagtccctttgcagctctggatggcgcgagtttcccacgtcccatccccttcctggctatgggcaagtgcaggctggatcctggcctcctccttcctggcctccagctcactgccctacccctggagcagaggggccttctacacctgagccacgctggccactccccaagctcactcgaggtcgaagctgtggccgacgcttgggcactgggggcttcctcctgctccccaaaggcggggtcaggacactcctccctggctctgcccagcatgtggctctagggctcaccacctcagttcatcaggtctctcctccgatggcttctctgccacgataggacccccaccctattcacacgcagccctggcccactccctggccatgcttcaccatctcctcacaccacgtggcatttcctcatggggagggtcacacctgtggcagctcagttttgcctaccatccgcttcctcctgctgggctgtgggctccctgagggtggggcggctctgatcttgcccctgtctgtgtcccagccactaagaatgcaggctggcccagagaatccctcagtgaatcgctgctggaggagtggatggtgacctgctagaggcaggagctggatttggcctgtgggctgtggtttgtgacccctggactaaccctgtcaggtaggatcgtctggtggacactgcacaccccaccaggtgcacagagccctcacccagctggatagggccctcacccaggtgcgcagagccctcacccaggtggacagggcccccacccaggtttgcagagcccccacccaggtgtgtagagcccccacccaggtgtgcagggctcctacccaggtgtgtagagaccttgcccaggtggacagggccctctaaagttcaggacacctccctttcaaggagccacctggagagagatttggggccagcttagccacttagccactttcttagagggcagaggcccctgatgctccagctctagctgtgctagtgaatttttaagccttcagagccagggagcgtgcgagcgagtggagaatgaggtaggtttctttcctccaaaggaaccttcagactgaaagtctctgggaagaaaccagtggccggaggtatcccaggagccagcttgagtctgggttttctcccctgtaagtggactgtggaaatctcccctctggttcaccagacacagaatccacgtccaggatgggaggaactgctctaagaacacgtgaacgagaggctttgggggtcttcggctcagccctccggggaaacaaggacccttgagaaagttggaccccccgttcaaacagcgtctccttccgcagcaaaacagcgtggcacttccattggcccatcacctacacttcagggcccacctccttcctggccccaggcaggaggggcggctacacatgtgcaccacccccatgaccgtcttgagtgtggttctgaagacgcaatcccaagatgaacacgatcgccctgctgcagtctgcgagtcgcccggcagccagacacagcgctgagacccacggggattcacattgtccccgctgaagccagagggatgtgaagaaagcaatcattttggactctactgccctgggttgtgtggtttaattgctcgtgtgaaaggaacaggcaggccctttgtgtttaccgccctctcatccaagcagaaaatgttccctttcttgaaatgctttaatggctatatttacgcagctgaaagttccttaagaaatgaaagtaaaatcaaattgctgcaaatgctcagataatttattggagaatattcaattcgaatatattaatattttagattttcatcattaattgaatattcagggatttaattttgtcactgaattgctggagcaccctctgtgaacaggtgtttaggatgagagctcaggcaccttccacaaatggactcttagagtttggcaatggccagggagccttgtgtctgccaggccagctccaggactgctgaccagacattgtctaggtgctaatgcgtgggctcccagggccactgtagagtgcagctgttctgaggacaagtttaagggtgaaggagagtatgtatgttggggcaagctggcaacagcccttgcttggaaagagatgtccttcattcttcagttgtggccttcatacttgagaaggtgaaactgtctgtgcatgaaatgatgatgacagcaggctgtggtggccattatccatccatccatcatccatccatccatccatccatccgtctgtccgtccatccatccatccatctatccctccatccatccattcatgcattcactaagcctttccatgtcaagcaccctgtatctgttggttctcacgctgctaataaagacatacccaagactgggtaatttataaaggaaagaggtttaattgactcacagttcagcaggtctggggaggcctcaggaaacttataatcatggtggaaggggaagcaaatatgcccttcttcacatgatggcagaaaggagaagtgcagatcgaagcagaggaaagccccttataaaaccatcagctctcatgagaattcactatcacgagcgcaacatggaggtaactgcgcccatgattcaattatcttccaccaggtccctcccacaacacagagggattatgggaactacaattcaagatgatatttgggtggggccacagcgaaaccatatcaacccccaggtgtgctgttgtgggtacagaggctacaacagggaacagatggaacagtccagccctcatggagtttatgatcaaagacagggataagtaactcttagttacagtctgggaaccagagaatgtgggatgccattgaagtttgatttcagataaggtggccaagaaagtcacttctgagaggactgaatgcagtggcagagagaatcatggggatatcgaggggatgagtgctccaggcagagggaacagtaagtgcaaatgctcagagtcttagaggaagagccaggatgtcagaggggctgaatagaaatggccagggagagggtgagagagaagaactgagagagtgtcaaggccaggtcactcaggggcgtgtggccatgggagggacttggtggttgattctgaaacccaaagagtgatgtggtgtggcataaattgatttaccaagacccctctgactgccgtgagggaccaggcagagcaggagtaaaggcagtagcaggaggcagcttctcaaccctcccactgagctaccagaaggccaggggtgttgttttaatgtcccgcccagtaaaacagctggaaaccccaatcttatcacagactggacatctgtgacccttgaggaatgagaggctctctttgattctactcatgagcatggggtcgcggagcttctgcttcactttgtgtgtgtatgtgaggagctggagtgtggcagccagaaaaagaaacagccctgaggggctgggggagggctgggggtgcagacagggtggggataaggcacagcgtaggttctggttaaaggatttctcctggcttggaagggaagtgatggcagaggagccctggggaaacggaaactcatcttccaggatcctggctcccagctcccttccggcacccagaggtggggtcaggaggcccccaagtgctgacagcaggtgttccctggagctgacagaggagacagcctgtgtgccatcagccctcctgggctcccagcccggcagtgttttcctgctgacagcagtcctgcaggaggcctgaccatgtttccgatatttgatgtttcctgttaatttctaacagcagacttttctaatattctgaagactcctttctcagaatattagagacctaaggagggaaagccacctccccaaagctctctgctcaaagacctgacttcagctcagagaaacaagggcatgggagacgaggcccaaaagcaaagccaatgagaagtagatgcgtgggaggggaattgcatcttggaaatcaacctgtccattagctatagaagacagcagaaaatgctgcttcagtttccacttccctagtggtgctgaaacagtcaggcttctgtcttcaaaatgactctctaaaaccatgccccagaaagagactttgtccccggggccctagcatcaagctggcctgggttgtgtggggctttgttttgctcgggcagaaagtctcgtctgacacaggtgtgggttggtcaggcaccagggctcagggacctccctggtaccaacccggggaaaagtcctcgaagctctcttgatggcactggctttctccgtagaggcccgagatggcctacggatgcatctgcacctgagctgtgtggggccctgtcagagtggttttcgatggagttatgtttgatttcggcttttgggcttctgagttgtaatgcctattgaagttgagaagctgatttcattttcccaaaatgtaggcttattaaaacaagaaaagccatggagccttggtgtctgtttcttaaaagcaaagttaagcaatcagccaaggtgcatgtcagaaaaggggaggggggcggtgcctgggctggcacccacgggataggaggggccagcagtcacaccctgcctgcctgaagcggcctctccctggaggacaaaaccagtggatcttatctgatctagtggtttcaggaattttctacacacataaggcacatcagggaggagaggaaattgttgatgtgctccgtgttttcagcagaaaatcgttcctcatgtcgctgcgtgcatgagcctgccttgcccggggcatgccagcgcctcagcccagcaaaccgacatgcaggcccagagttaggcaggggctgcaagcacagcgtttcccactcaccattgcccctgggaggtagaactggtggagaagggaaaggaagtatggttgtcctatgcgatcaattggggacagcccaggcctgaagactttgtctctataaataagtagctaggtgaagacttaggttttctatgaaaaataatggaatctgaagctaatccatgttgcaaattcaaggtgtagatttgggcagggttgacataatttattgtgttcagtctgaaattggtcaataaagtatgacggggtgaacagtatatccacagtctattacattaggttagtgtccatccacccttccaaccatacacccatccatctgttcatccatgtatccacacttctacctacccatccattcatccatccatcctctgtccacccatccacacacccacccatctacccatccgtcatccattcatccatccatccactcaaccatccacccatccatccacccacctaccatccatccattcatctctccattcatccattcatctctctatccattcattcatgcatccacacatccatccacccactatccatccattcatcctttcatctctccattcatccatttgtctcttcatccatccattcatctctccactcatcattcgtctctctacccatcccctcatctacccatctatccattcatctctccatccatccattcatccatccacccatccatccacccacccaccatccttccattcatctctccatccatccattcatctttctacctatccattcatccatccttccatccatctacctacccaccatccatctatttatctgtctaaccattcattcatccatccacccaccatccacccattcatttctccattcatctctccatccattcacccatccattcacccacccaccatccatccattcatctctccatccatccatttgtctctccatccattcatctctccactcatcctttcatctctccatccatttatctatccatctatccattcatctctctctccatccattcattcatccacccatccatccatccacccacccacccaccatccatccattcatctctctatccattcatccatccgtatatccatccttccacccacctaccatccatccattgatttctacacccattcgttcatctctccattcatccattcatccatccacccatccatcctcagtgctctcaccctcagactatctcattgctcctgacagcagcaggcccctaagccagaactctggcataaccacagcacccagctccagctactgtttcaaaacgcttaaggcctttcaagtaaacgaaaaaccgaacaggcaaaaaaattgcgtcatgagttgctgtccttaaaactgtttcaacatttgaaaactccctgtcgaggataaaggtaataagtttttgacagtggtggacaattcttccaggtgtttggggaaagccattccatttggcttacctatgaacactacataaactttctgacttgatgctgaagcctagccctgaggaagattttaggaccagagcagtctccttgattgttttcctaaatcatcagcaacaaaaatgtggacttagagaaagaagtgtgttcacccagatttctccttagaggaaatgttaggtttttctaggaaagtccatcttaggccggatgaaaacagtgattcacccggtcatggatgagacgtgtattgcgatcagctctgtggctggtgttgaggtccgcagtgggccactcagtcacggttcctgtcctgaagcactatacattgctggtggagacaggcggtaaaggcaagaacagatgggaggagaagaaactgttagaacacggaaggaaccacagggagagtggagcacagggatgggatgggcagtgaggggcaggctgggatggggagcaaggctgtagatgggacgtgccagccaaggcctctccgaggagccagatgctgaactgggcctgcatggcaaggagccggctgtgcacaggtcaggcagagacccgcaagtgcaaaggccctggggtaggaatgagctgggcacacccaaggaatggaaaggtctgtgcggtgaaaatatgagtgagggaaagggagggaggggcctgggggagggcaggagcaggtcccagggcccccagccagtaggaggttgggtgtagctccaatgcaggaaaaagcctgcaaggagccatctgattgtccgtctatcatcccctggatgcctttggctgcctggtggggctggaaggttaaggcgagagctgccccagagccccagggaggagagagttgccctgaggagagatgtgggggcctgggctaggacagtagaggcgtgaaggtgaggaggggaaagcgggggcccagatggcctgcagggaaggacccagaggacttagggagaggcaggtggaggaaagggagccatcgaggctggctcctgggttttcagcccaccctgctgttgaggtgacagcacccagcatccccactgctcaggaggtgcccacgtgtggggtgccatggggatactgtgcacatctgtcccccctcctgcacatctgtctcttcccactccctcctcacctcttgttattaaagaggcttcctgccccagcccaagggcctcttccaagatgcagctgctgggtgcgcgggagttaagtctgctgggctgattcccgggctctgtgttcagctctccaggatgctgcaggaaagcaggaaatcaaataaggccattgacacctcacccacaatctttattctattgtctcttagtccaccccaaaaaatgtaaatcaaaataaatcagaatatctttagatgatgctgtgtgtgtgtgtgtgtgtatttttttttgagatggggtcttgctctgatggcccgggctggagtgttgtggcatgatctcagctcactgcaacctccacctcccaggttcaagtgattctcctgcctcaaccttccgagtagctgggattacaggtgtgcatcaccacacccggctaatttttttatttttggtagagacgaggtttcaccatattggtcaggctaatcttgaactcccgaccttgtgatccacccgcctcggcctcccaaagtgctgggattataggcatgagccaccgtgcctggcctatgtgttttttttgtttttgtttttgtttttgagacagagtttcactctgttgcccaggctggagtgcagtagtgcagtcttggcttactgcaacctctgcctcctgggttccagtgattctcctgcctcagcctccagagtaactgggattacaagcgcctgccactacgcccaactaattttttgtattttttagtagagaccggttatcaccatgttggccaggctggtcctgaactcctggcctcaagtgatctggccaccttggcctcccaaagtgctgggattacaagcgtgagccactgtgcctggcccagatggtgcagtcttaatgggagcaatgtcactcccaagcagagcaaacattagttcttggcgacaaaaaaaacaacttagatattataatggatggtggccctccaaaggcacataaacagatttcatggctggaagaggcaactgggaaagaaaaattttaaaaaggctctgggggctagggggataataagagacattgagaaacatcgctctgggacccataaagcggcccccgaggtcagggtgctccctggacagtcattttcaggatcccagcaagaatgaggctgaggccgggcgcagtggctcacgcctgtaatcccagcactttgggaggccgaggcaggtggatcacgaggtcaggagttcaagaccagcctggccaagatggtgaaaccccatctctactaaaaatacaaaaattagctgggcatggtggcagacacctgtaatcccagctacttgggaggctgaggcagagaattgcttgaacccgggaggtggaggttgcagtgagccgagatcacgccactgcactccagcttgggcgacagagtgagactgcatttaaaaaaaaaaaaaaaaagaggccaggtacggtggctcactcctgtaatcccagcactttgggaggccaaggcgggtagatcacgaagtcaggagatagagagcatcctgactaacacggtgaaacctcgtctctactaaaaatacaaaaaaaaaaattagctgggcgtggtggcgggcacctgtagtcccagctactcgggaggctgaggcaggagaatggcgtgaacctgggagatggagcttgcagtgagccaagatggcgccactgcactccagcttgggcaacagagtgagactctatctcaaaaaaaaaaaaaaagaatgagcctgaaataagtgaatacctctcaccctggcagctcaggaggtgtttaagcctgggcccctgggagaactctgatgtgagtacttctttgagaggtggaggagacacagggtggggcagggaagtgaaccaatgaaggggaggcaggccagtaaatgatgtgttatcaagacacccgcctgggggcagctggacattccactaagccagccctgggaacccgtcgttcccccacttccgccactgtgttgaggtcctggggtgctcatacaccaagtcccttggtccttggttggaggctgttcccaaggacattaattcctcagcattttcagcctgtcaagtgggtagcaaaggtggctcagtgggaagagaaaggccactggcaaagagtcacaggtgctggttggaagttggcaaatgtgccctgaaatgataacatcaggcagacatgggtgggcacccacagcttctgctacaatagcacatccttggactggacacaggctccatgactctcccccaaaccacctatggctggtcccatgcacctaggaccaaaaagaagctctaacccaggccagcaggactgcaaagtgcatgatcacacagtcccgcaagtgggtcctgcctgcctgctctcagacctgccacagggctcattgctccaggcactgtgggcattttaggatgttcttaaatgtaactatgcgccttataggaagaacgtcaaactggcctaattcctgagccactcctgaagtggttccctctgtcctaatgtttgtcagagttttcttggtttcttaaatatcagtagaacagagtgttcctccactgggatgatggtgataaaggtgggagtggtggtgatgatgtttatgatgaggatgatgatggttataatggtgagggtgatgatgttgatggtaatgatggtgatgatggtggtgataatggtgatgatggaaatgatggtagtggtaaggatgatggggttggtgatcataataattaagaggaggacaagggctagtatttatcattgctaccagctaccatgtgagtttcatacagatcatctctaaaatcctaagtttagtcctcataaaagccatcaccttcccagcaatcactttgtactgaccctttcttcaccatagtatcctgagccccatcagccagttgctctcctgtgtaccagggacagaatggaatgattactgtgaatgagatgcagcctctgcctttaaggagcccccaggaaggtgagaggaatgacaggtgagcaggaagtcacatcatggtggcgtaaatgagacactcagggtgacaatgggagccccccaggacgacacatacgttgtgcttggggagactgaggcaggcttcacaggggaagagaggcgtgagcagaaaacagaacaaaaaggcatcatccccttaaagcaggagggcatcaaggcagagagaagggcagggaggccagtaggccactgggatgtgcagcttgctttgcctgtctggaacataccagaggcggggccaggagtgtggactcaggaaggagggaggctgggccccaggaccataagagccactgggctggagtttcattcacacagccaccctggaaggctgcctgggacagaagcaatgttgcatgagtgaatgaatgaatgagtgaatgaatgaatgaatgagtggatggaggatgaagattctcagagctgtgctaagaagggcgggctttgtcctgagagtacgagaacctttgctgagctttcaggcactgagtgacatggtcagatctgtgcttaccttaatccatgcttcccctcccactccccacacagcaagctggaccctggtggaaggcaagggcagggctggcccctccccctccctcaagcccagaccaccatccagggaggctcccggaccgctgcctcctcaccctgtggggccactggctgtttacagtccttccctgcactgccctggcctgtgaggcgaggagtgttatcattttactcctatcgttttactgaggttcagagaggctgagtgactcccctgaggccacacagccaggaatctccagagcaggaccctgacccatcccttctgcatccagggcacatgacaaccgctcaaagccgctctctggcccctccaccccacactctatttacagcccagcacgggccagggctgcccaggaggactcagcttgggttatcaccttctgacacagacgtcactacccccagccccgcgtcctacagcctcactgggcccactgccctgcctcccatttcctggaaaggggcatcctgtaggaatagatgaggtcctgcttgccatcctcccgggccctgtagtggcccccgaccattgctctggcttgggaaaggaaggaccaaaggatttgattatttctctgcttggccacccctggggtgtggttagccctgagaaagtcactttgattacagagccagggtctcacatgaaggctgaggtgaggctccatggtgtggaagccgcccagaggtgtcagggcccaaggggagctttgaccctgtggctcccagcacccccatcctgctgggaaatgctagaaactggagtatgtgagaaccgaggggtgggagggagaaaatggagctaccgagcagaaaccgtttccagggcttctgctgaagtgggaaatctcccactccatcgagaaattatttaactttcacgctgccttcctgacagtgaggctcgcgtgcccatgccggcttgcttgggagcgccatacagcgccagctgtggcatcagctccccactggggaggcagtgccagccactttcctgggtggccgggtaagagggggtgagagctgctctctgaaggctgggacaggaagagcccccccccccccaacactggccagctcctggtggacacaagtccctcctctccccgagcattggaagaacaataatgccgttgccaagtcaaagggctcacaccatccactgcccaaggtggggaagggttcacaccatccattccgcagggtggggaagggttcacaccagccactgcccaggatggggaagggctcacaccatccattccccagggtggggaaggctcacgccatccactgcccagggtggggacgagcaggaaagaggctgaaactgcacagcggggaggtaagcgttggatctggcagctgagctgcacttccccacagcccaaaatcaagcagtcctggcttacatgaagctggggttgtatcaaaacaaaacaaaaccacaccacctggtgggcttgataaaaacatccggcctctggcagtggctcatgttgcaatgccagtgctttgggaggcaggtggatcacttgagcccagaagttcgagaccagcctaggcaagatagcaagatcccatctctacaaaacaataaaaaaaaattgccaggcgtggtggggcacacctgtagtcccagctcctcgggaggctgaggcagcaggattgcttgagcacaggaattcaaggctgcagtgagctgtgatagtgacactgcactccagcctggctgacaaagtgagaccccgtctctacaaaaaacaaaaaagacaaatgtccggccaggcctccccactgaggttctggcggagaagcccaggcggagagatcggcatcttttccagcttctcaggtagggcatggctgcaggacacggaccgcaggttagggcaagctgcgggcctcacggggccctgtgtgctgggggacagtgcttgctcatcctagagtttttctagagaaagccaaaatggaaaagcaccactccggggtcagctccagcctcactgagcgtccacagccagcctctctgagtctcgctgtcacatccatgagcagttcctttgacacccctcgcccgggtcacaccgtcagtcaccgccctctcaccctgcgcctctcctgagccagcagccataacccccgccccgcccggccctgccccgggctctgtggcagcacctcctgccaggagcaccctcagctccctgcgggagcacgcagcaacagaggggagggggtgtggtcccgcctcgcacgcatccccgctgtgggcggcccctcgctgcgcctcagcctctccctggccccacgggcctccacactcctcacatacagaatgggctgtgggtcctcagcccgtccggaccctccgctcctttcctgctacctccgtgcgcagcaggccttgtggggtgtggtccagagcgtggccccggggtgcatcgcgctgattccactgcaggcgggtgggcccctcaggaagaaaactactcaacagacgcggctgctgcatgctctgtgtggagccacctgagtgttagactggccaagaccacatggacaaatgccacctcggccaggccccttgctcctggtgaccagtactcatggacaccagcacgctgggcagaggctctgagtaactttctcacaagccagggaccctggacagcctgcttcttcctccttgcagaagaggagagggccgggccggcaggagtcctccgcagcagccccaggtgccagtggtcagtctggcaggatggcggctgtgtgtcccgagtccagccaggacacggcgctggtcccagtctcattagctcacgtcgatgcgtcctttccaaactggcagtcagtgaggattagtccccaccgacccgatgacccgggctcctttcgcgacacagggcaagggctgacagctactgtgttgtgatcaacagtcccctgagatttcactaagctcaaggctttcttaatgcaaacttaaaaagcttttaatgtatgttaagtagataccagctacttgtcagagctgtggttactgaggattaattttatagctgctacattgctcatcaactgttacttgtaattagcccttataaatgtttcaaaataatcagataatatttgaatagcttaagtaaactgtcttactacctctatgaggaaattacgtgtggaaagctataaattgggaattgcaaagaggtaggtctgtgcaactggctggtgtgagtgttgagttgggcgaaacccagctgctacctccaggagaaaaaggttaaatacgcttcataatataagaggattattttaaatattcccatgaatttctggagaacacgagcaagctatgaatgttttgaggcctcaattccctgcaggctggtagggactttgcattttagagtcgatctttgtgctaaccgttaaccattggcacctgtgcccagagcctgggcctgcgtttccaggtgggttggcatcaccctttgtggtctggagaggccagggggctgctctctcccacgtctcaggagatgcgtcctgggctgctcctccccaccaggataccacactcagcctgggcactggggataggaggggtgctggggtatctgcacaaagggctgttgagctgggcccagggagctcctctccatctctcctgggtccttcaagcccctcccagggtatccccgctcctgggtgggcagggcgtgggcccggtcacagcggtaacagatttccttcccgtgctgccttcactgatgctcagcccaaaaggccagtcacatggtcatggctgccagcctcataacaccacggtccctgcggggcctcgagtggggcctctgcagtggctctgccccgctccccatctctcatgcaacctccctgagagcccagggccatctccgcttgtcttcatggcccgtcccttcccatgacccgctcggctgcagcggccctcggtgggcacagtcaccgggccggcttccccgcctgtgcttcctctgaggggttccccagcccacagcatggtccagggccgggtggggccagcatcctctactccctccttgaagcctgtgcagggctgcatcttctttgtgtgcaagcaagcgagcggcctgcagccccaagggccctttgtgagtgctgcaaagccccgaagaccagaccgcactccctcgagtgcacacacggtgcttctgggaagctgcccggccgccaggggggcagagctcctcgccccatgaccgggcaggggcagttctgcgtagccgactctttgccccctccttgggcactccctttagactacgccaagagtcccatgcccgccgcagggctgacccagcttcagggccactgtcactgcaaccatttgctgcactcttaccttatggctccacgggggatggtgcttctcccaccactatccttgtgaatctcctcatcgccccccacagaaaggaaatggagcccagagagggtaaaacacctgcccaaagacacacagccaagacagggcagagcggggctgcagtgtgagcccttcagctccaggaccactgcctgcccttaggacctgacaaccttaagtccccaggatatgggcagggggctcacaggaagtgctggcagtgcccggctcaaggcagagcctcaggcaggccgagagcacagatggcctcttggacacaccccaaggggccggggctgggagacagatgggctggaactccctgccttcccttgcctgataacaggcccactggggaccctggggcgtgtaacctctggcactccacatccttagagcccaccagtgagaatggccagtgtccactccacagtggcctcgggcccatctgcgccacacatagggtaggcctgggcatggctgcagggccctcctgggaccctccaagcatcttggttgggggcagctacgaggggcactgattgtccccttctcatctgtcagtttgggcactgcaaccccaggcttggttttcggtgggggcttgagaaacccaccttctgcagtgacattagtcctcaagacgccacagcaccggggctcctgcctcccgttgggaggtgttgagggcttggggacaaaaggcatggacagcagcacctctcagtgtctgcaggctgcagcgggagagccggcagaaagcagggtggtcccccgacacctagacattgggggagtggggtcaggcagcctctgggcagggccagggtgtccagccgcatcagccaagcgtctctctagggttgagggcatcaaccacaaacactggtgtgtgtggttaaagccatggaccctcagagttctgagacgtcatcccgaagccacctgtcctcttctttgtgtctctgaagtgccgaagtaggtgttccttcagtggtcactccctgtctgtgtgagttgccgggagctgctgtcacaaatcaccacaaaccaggtggcagagaacagccccgtgtagccccacatggtgctggaggtcagagtcagaggttagtttctgtgggtcaaagtcaagggtcagcagggccatgctcccactggaggccctaggggaggacccatctcctgccctttcccgtttctagaggctcctgccccacctctgtggctcctggccccttgctctgtcttcaagggcagcagcacagcctcctccagcctctctctgctttctttccacatcaccttctcctctgtagtcaaagctccctctcctgccctccataaggacccttcacatggccttgaggggcccctgggaaatccaggatgggcctcatctcaagatccttcactccatcacgtctgcaaactctcttttgccatggaaggtggcattcactggtcccaggatgagaacccagatgtctctggcagccggattcagccagccttgctgccataagagaatgccatggagttcccagacctgtaagtggcgcaagagcgggcctcaatcaggtctggtctctgcccctttgtccggcaatgtcctcaagccctccccacctttctcttataaacgaggatgccaaagacagctgcattcacagagcacctccttggagccaggcccaggcagacccctcctcggcttcattcagcccctgtggcagccccagaaagggcgctacacaccctgatcatgctctgttcccagcagagacaacagtctcagagaggtcaggattctcactcaaggtcacacagctcaaagtacagaactgggctttgaaccccaaaagtcagactaaagagcccaccctgcagccaccctgctgtgtgtagccgagaacctcgtgggggtcagttgtgcctgagaaagtatgtgaggaaactgaagctcccccaaaatcgtgggggtggccccatcgtccctgttttcactgtctctgagttagttgtaaagaaaggaatttctctgcagagcatcgctttgaaggaaaacttacttggggaaaaaaaaaacaactgtctccgttgggagcaatttccaaacgggagtccacgcgtgggtttttcgcttgctgcttcaagcaaatcagccattttcactgcagaatggctgcaaaggaaatggagaaaaggcagagcgcagccctgggagctgcctcccagcctgggggccgggcagggggaaacaggtgccacctgggcctagacggggcgatgcctgggaggagaggctggaggaaccgggccttcccaccacggggccctgtctgtggccaccgccgtccacagaggcttcacaggtgcatgcagcgttcctccccgtcctcctggctgctgccttttgcgggatagtcgcaggctggctctcgctggaggggcttctccgaattctgtttatcctgggtctggctctctccaacatggcagctggggaggcagaggaggcggcgtgtctaccttgtcactgccggggcctgatttaccaacaggtctggacagcgctcccctccttcccacgcccccactgctaattgcctgcctgtagagcggccagccctgtctcagcagcgcggcgagtcgcagctccgtcgttgacggtgtgtccgcgatgtgctgtggggtcccgtcgtggcggctgtggacgggctgaggtcttcctctggatgctctcagagtggcagggagcagcctgggtactctccacgctcggcacaatccgcccgggctggcagttagagaagccaggcagagaagtgcggccagagaggctgtccaacccaatttccccgggctgggttatttgaaagtctaaaactccctaataccaagagacgggcggtatttaaatttaagtctggctcccaaatgaaatcttttcgttcaactgttcaactttatttggaaatatgaaatggtaacttgattacatgttaaggtagctttggtcgggggattagagccgaaatctctgcccctctgagttcatcctccagcgaatggaatccatccaaattaggaatcagttctgctaccgcgggcgagccgcaggcctggtggcctggagggtggggcatcttgaggctgcgggattccagttactctgcatggccaggataagggggcgcccagagctctgcgttccccaagggaggttggaaggaaacgttcaactgtgtgcttcccagagccctagcaaatcactcgatgtttataaactgtcagtgaaagtcatttgtaagaaaagctccatttccagtggctctgcagcttagaaaactcaaaactgaaaaacacacgccacccaggaaggacaggagaaacgagaacaggctccatcgctgcagagcgtgaggccggcccccgctgcgtctgcttccaggaggcggtgccgagacggcggaggtaatggaagcagaaacgagtgaaacttttttgttgtgtttagcaagtatctcttgtcaaggaagttgccaaactcacaaatgttcttgccaagagagaggcgcctgctctccacacgagcttgttgttggtaaggaggcacgacagaaaacgtgtcaagctgggacccggagcaggtggtggaaacagcagtttgcaggatgtcggtcctgcctgcatggcggcctgagagccgcccgaactgctgtgctgaggacggggctggagattcgccctcaggtgaggggctggcctctgcaggttctgttttgtctctgaggcatcaccagacgggtgtcaccagccacatggtgcaggtgaggagacagaggaccgaggcgggtagaagtgacaggagaggcaaagagctgtcccctgcacagccactgtccatgctgtctgaccacccctctccgccgtccagcctctgcatctggcctcggcctcacccactgctggccaccagtcacctggaggtcagccacacccggggggcagctctgctgtctggacctctgagccacaccgaaagcactcagtcccccttcctcctgaagcctccaggtcctgccctctccttaccatatgggttcccctctgagcatccctcctgtctcctctgtggacctgcccagctctcgcctggtgggtgtgtcaggtttctgctgcctcagtgtggggatcctccaggggagggagtggccgtagcctcagaagtgcagggaaagtccagaggggagtccccgtgtggaggcatcaccatctaagtacgaaaccagaagaagagatggctcagaggtctggagtagaacagtcaggactcatctgttgcaaggggcagaagccaactctaaaaggcagaggccagtgaaaagtgcaagatttatggggcacataaacggaacatacagagctgtcagcttcaggcccggcaggatctaggcgctcagacaatgccagagtcagcaggcgctttcccctcatcccgcagacctgccgtctttgacattagccccggtctccacagaagccccagcgccaggccaagagtgcatcccagtaactccaagttcgtggaaagagaggtcctttccttcttgtcattccagcaaacatcttgggagtgactcattggctttgatgggctcatatgcccagccggaagccggtacggtgctgagaagactctaggctctgcttggccagtccttgacccagccccccatccctacccaagctactagaacagagaggagcagagaagaacagctccctaaggatccctggggtgctgtccccagaagaggggagagtggacagtggacagtgagcaagcaaaacaaacaggcatctgctgagaagtggccaggatggcctctgtgttggcagatggaggtgggcagcatggctgggtgtcccacagagccacacccgagccccataaccataaaggccagcaagggtcagggccacctttccggccaggcacaacctttccgggatccagagggtacactcccctgcccggcctcagacactcgccctcctgcgaggaaacacaggctcctgtgtgcagcacagagagggcagcctgcccgggggtctcggacccaccccaggtcagaatcacctggggagcattcgactgcctgatgccacccaacctaccgcatggcagaggtatgtttaaaactcccacgaggccagggcagtgtattgggagatgctcaagctcattgatcatccgtggaaaacaaactcagggaggggccctctcacaccggccatcaccccaagatcatccagccctgtggtgggtgcatgagttgtcacagccagagctccacaaagcagatttaatttagaaagagccaaaatatgggatcttcattgcccggcagttgccagctatgtaggtatatgctcaggagagacccaccatcactcactcggtgtccactgtggtgctgtggaaagctacgcaggcccgctgggaggtgggtgcttggggcaaggggaaggcaggaaacctcgcctgggggctccttccgctctgtggcacccagtactgaaagcattgtggttcggggcacatttagaatggctgcaggatgtcattctggaaggaattccacatgtgtgtctgttctaggcaacagcctattctgtaggacagtgcggcagtgacctcttagtagccaaaaggacccttgcgtcttcccagatgtcagagccaggcgtcgtggcctgcctgcctgactggttgggggtggagtgttcttgtcaccactggagagatgaggaggggggcgtccacagggctaaggaagcctacccaaagcctcatgcccaggacaaggagaccaggcaccaccacctcccacggggttaggaacacacggggaggaccgtccactcgcctgcaggagggcaccagaaacacagtttgtgcggccgtgcacacccagggtgaggaggtgccctgttaaaagggagtggggaggcaattccatacccaagtgagcatctgaggaacacgtgtgcacacacatgtccacgcgcacgcacacacatgtccacgcgcacgcacacacacatgcagtaccatcggagcaggtggagggtgggggctgtagcagaggccggactggaattgctcaggggctgctggaggagctgcctcacctttcccttggggctgtttaattctgcgggggaagtgaggacacaggaggaaaccttggtccctgccacggctgctgtgagcagacatcagggacatgttcatcaacatgcatgttttgccacacacatgtgcacaccgtctctgtgagtgggaagtgtcagcatctgggggtggtgttttgtgcctgttcctgtctcctgctggggaggggtggccacagggcctggaggacctgggtaagagccgctgcactccaggttttcccgtaatgcacggtacagagatgggggcttctccaaatcacagctacactttgacaggggatctttttttaactactacaaagccctctaataatgggttgctaagaaactgacacaggagatgattttgaaaatgtctcgctcatcccctgatctatgagctcccagggccccgcagccccgccagcccccagctgcaaggccagtggggcaggtgccgggagggcctcgggaggtgcctggtgggtcctgccagacagaggagtggcctgtgggagaactgccctggggaaggaagtcagtgatgttgtagagactgggtgttgtccagtccatggagctgtattcagaaccaccagggccagacccagccttgctgtggccccgctggggtctttggatctcaggagagtgggcggtgggagaggattccctgagctgtagagtttaccctcagcttctcgtaacagggtgtctgggtacctaaatgtcggaatttgaggctattcaagttcaatgtgttggatttggaaatctccctcctctttctactccatctcctcccggctgggaagttgcagccctttctccccgtcaaggtgcagctgtgtccaccatcagcgaggggagtgtgaccaagggcaggtgttccgtgcagggctggttggtgtgaggccagccacagagtggtggccaaatagcattcggggaggtaaacagaagattgtgagaacagctggggaactgtggacggctcttcagactcaaacggtgtgatgaacaaaccgactcggaaaatgcctggcgccagtaggaggcccagctagctgggagttctgaaatataggaagggaagtgataggacgtctctgcacacagcacatatccatgcaggatggtcagtactgtcgctttcgttaggttagaggccgtccactgggcagcaggctgtgggcctggcgggatgcaggcacagcgcgatccagcacagtgctgggtggtctgggtgccgcctcagggcaagctgccatagcagcgatgagcccacacacgtctccagccctgacaatgaaccagtaatccagctcctgggaatcccggcacaagggagctgagaccagcaagtgtggtcagcatgcccctgccacacagaagcagcatggaaataaatcctccttagctgagcactgggcccccacagcctggggaaggctgcgggggcccagaaccgtggctctggcaggaacagagctgcaagccccaccccagccctgggttcaaaatcaccccgtctcagccagtcactgaggaatcctcacttccagaaccccactttgatttcaaacctaagggatacaatctgttttcttggacttgtttcaaatgtagcaacaccagctgcaaaaataaataaataaataaataaataaatttaaaaaaatacagctacgtctctgtgcaaagacacatttataatcactccgccctgcagtcggtggggaaagcctccgtgtagacttcattttgagtctgtgggcacattaaggacaaactctagatcttaatgatgtgtaggttttgtctccagccctggctcagcccctcccagatcttgctacgtttcggaacattaaagggaatttatgcaaaattcctccttaatgtgatttgaaacagaagagcagccccacactggccctcggagcagcttctccggcagcacgcccctccccaggctgtgagcctgcaactgcctttccagtgtgggagctgctcccgtccaacccgcgttcctgcatattgtccagtccaggcgctggccaagggcgagtgtccacacccgcccgcctgccccctccacctttgactggattccaagaatactcttgataccctgatgtgtttgtttaaatcaacttcttttttaaactacagacgttgattttcgaggacatcttatggagtcattgtttaacaacaacagcaagtcagtagccataaagataatgtgactttctagattaaatacaatgtcaatacagaagtcatgttattgtctaaaatgagtgtgtgcccacccaccacagaaggcatcccgagtcccagccacagacgcctggcaccttggaaaatgcccgtgtccatggctgcaggcacgtggccaggggtcctctggacccagacctttgattgggaattaatctatatgtgatctgattccgcgaatccgggtggtgtccttttcttgtactattcagacgtgtttctaggaaggacgtgctgtcatgacccgccatggtggtcccggggatggtcagcggcgggatgatgggtgtgatgtggtcccggggatggtcagcggcaggatgatgggtgtgacgcatctgtgctacttgggattcaaattcatctatgatcttaaatgtcgtggcaaattgcaaatgacacccaggaagacaagtttacctgttatctgcgtggattacataactaaaaccaattcccagttccaagtatcctgaaaacaagtgacatctcattaaagatcaaagtcccagtatgctggatgattaagtgtaattatagccatacatactcgacacgggactaatgagtgttcatgcttggaggagggaaagcaggctgtgagcacacaaggcatggctggatcccattctggatccgcctatgccggggactgcatgacaatgggcagatgaggaggccaaagctgggaactggagttttaatgccaggaggggttccggtagaaagcagctattttctaaccagggcggtgtttttcattgctgggaggctgtttggacgaaggcagaaccttccatacttgcaaatgttacaaccaacaagtacctgagacaaggcaggtgtctagagtgaggacggtgaggtcggagcacagcggggggtgggggtcactgcaggccacagaccgtggtgaagagcgtgtgcattgctctcagtggcacaggaggctgttgcaggcagtcaggggaggaagatggtctggctgccctgtagaagaccatcgtatcagttggtgattgccgtgataatcctgcataacaaccacccataaaacctcagtgacatccaaccacaagtgtgtttctcacacatccagaggtttggctagcgttggtcagacctggacgggcctcagccggggtggggtggggggcacctgagcctagacctgttctcaagacggagacagagatgggtgagggaggccgggccagccacactaacatcccactggcagaccccgggaaaggccatggccacccacatggatgtgtgggtatggccacatgtggctatccaccgggccagtcggggcggctgtgccaggctgtcgtcccccccatgagcctgctgtgtgtgtctgtgacagagttccttgtgccattaccaggactcttcccagcaaaaactgccctcggccaagtttctgacctgggttctcagacccaagttctgacccgggttctcagacccaagttctgacccactctgctcacccgcagtgggaaggagcaagggagcgtgtacgggaaccagaatcagggagccacaggcacacaggaagcccgagagagccccagcccgtgtgcccgcctcaccctgcctcctgcctcccgccctgctcccatccaccactaccaacacctcccagccccctaacaagccaggaaccactccagggctataaaacatttaattttggaaaaaatcagtactctgccgctagatgacgtgtagccgcattcagggtctggctgccagggcagaaccaagcagggcccgcagtctgcaagaactcctgggacccccagatgcctcggtggtcacttctccagtctcagctgctcaacagagccactgccccttggcccggcttctccagaacgcagccagcacagagggtatggccgctccaggaagcttcgagacgggggctgcaggagcctgcagagcctgcgttatcctgcactgcaaatgatgctgcatttgtaacgggagctagaaaggaatcagtcaaacgaactcatggctcttcatcccctgcaaaactaatggcgcggtgctgactgccgcatcctcagcagccgcgccacatcctcagcagccccgccaccgcctgtcacacctgctgctctggaagaacaacagaaaccacatttccaaaaaaccaaacatccccaaactcttagagaaaaaaaaaatgcaatccctgctgaggatgtgaaccaggtgaagtgaagaattgctggaggaaacatccaaacggcttgaactttggcaaggagcttttcctgaaagctgggatccacatgccggcagcccaagaccgccctcatcgggggtgggaatgaaatgccccttcccggcttacacagacacagcccaggagaaaaagcagtgaccatttgcctgaaatcaagatcacacttttgacaatctgaagcaaggaaaaaacagcagacatctatctgtatgcttttgccatgaggaaaggaagctcatttcagagcagtggaatcaaccagttagaaatgggaaaatggtggttccctagcccagaacatcccagggctccctggccttgccagtgctactgtgtgaaagcggagcccaccagcccacaaatgagcccagccactgccacccggggtcacgcccctgccacccggggtcacgcccctggctgcctactgagcttttttttttttttttttgagttggcacccccaggctggagtgcagtgccacgatctccactcactgcaacctctgcctcccgggttcaagcaattctcctgcctcagcctcccatgtagctggtactacaggcacacgtcaccatgcccggttaatttttgtatttttagtagagatggggtttcaccatgttggccaggctggtctcgaactcctgaccgcaggtgatccacctacctcggcctcccaaagtgctaggattataggcatgagccactgcacctagccgcctgctgtccttcagactccccgcctgggcttgggtttgaggccctgtgtggttttcccatctgcccgccttcgtctttcctgtttctcccccgctgcgggggacacagcactctcaccgtgccttagttcatctgcttccaagggtggctgcctaagcttcactcaggttttctagaagcagagctgagactggggtttaggggcatgttattgggggcggggtatcagggagggaagtggtaggggtcggggagcagctaagggagggcgtggttgcagccagagacggtctcagccccatccctgccagagctgaggagcacaggctggcctggggtccctgccctcaagccgtcactggccctgggctgctgggcctgccgggtggggctgccatgggccaagggcagctctccagagatggggcagctgtgagctgttaacagccagcccccagcagctggagaaggggttcgctgcccagggaaatgggtctgggcctggtaccgactgcaccagcttccacctctctctttgacgtatcctttaacccccgagagaatttcagccaccatacctggtctgtattttcagtcaaaccatcgcaaacatagtcttaaaatttcatgaacacattccctgcccctggtatgtaatttagtcactgaccaacagatattaactgcagttatgtagaagattgctccttgccagccaacgccctttggggataatacggggagttggggcttggatgtgtgcattttccacgatttgcatttgtacaaaatgcttgcaacctcctatccctccctcaactactgtatcccaaatacgtggaggggttgtgctctccaggccatgacagccatgcaagcttcttcctgcaggccacctgcacagccaggaacagatgaggaaaaatcacagccgcctggtaacacacaagccctaacatgatgaccaaatggggactctgtggggaaactgcaagtccagacgtggtggaggcgccctgccgaggctctccgggccgcagggctgggagtctccacgcacacatgggaggctgactgcgaaccacatcccgctgccttccttttcaaacagagagagcaaggttttaaattattactgccagagatttcaaacagaatttctaacgtccttggcaaactcctttggtttttagtattaccagtgtaaacaagattgtggtggggtgaccagttcaaatggttcacaagctccctccagctccttggaggtccccagcttcgggccgggatctcccccacccagggccacaccctcgggagtccacgtgtgtcctcactcccttgaggagtctggagtaatgtacttagctaccaagcactgggcccctcaacctgcccctccccagtgccccacatgtgctgatagcaggagctgggggatgaagtgagcatccctgtgaggactctggggacattctctttccaccaatggggacctgaggctcagagaggctgtcacttgcccacggtgtcacagctggaaggcagtggcttcaaacccagatgtgtaattccaaatgctgtataagcatcgcatccccagcttctggggctgggcctggcagggagggagcggtcgttctgctggctcagggctgtgtaatgggggctcagactctggctgtcggaagggcaagaactgggtgcctgggcctctttcggggctccagcttatttctgtttatttttattttctcaccttgttccctttccctcgacaaagcttgactcttcccaggaagctatgcccaactgccagggatcccatagcctccttggctcaccagccctctccagtataatagattaccaacggccctacccctgccgcacaaaccctgcacagagggtggtctccagtgcccctgggagcagctgaggccctggcccaccttgctcaccagggtctccccagcccaatatgtagcaggagtccatacgtgtctggtgcagggctggctcccaggccatccccattcctgagaatgcagaccaattgttccaggcacatccaggccagaggagcccaccccaggtgccgggcccatgtgcagcgtggggaggggctcagtacggggagcaggtccccaccttcctgctgagtatggtaacctgtgtgtcctccatctgtggaacggggacaggaaaggcccactttgtaggcagtgaggcctgatgcccctaaggccaccccagggactctcttaggaacctcacgctgtgaccctcccaaagcaaggcacaaaggcaagcaatttgccccaggtcacactgctaggaagtaggggcaggattggaacccaggccttcagagacacctgaagggccctggaaaacctgtccctcactgtgggccgaggctggcagatctgcccaggagcttggcagcattgacctgggaggctgcggccgctcgacgacgatccctgcagacccagcccctcacacccacgctcgaagcccccaaaataacttgcagaaaacttgtttgtgcaagagatggaaggcagagctcatgtacagagacaacatttgcagtgtgcaattaagctgctttgcagcgatgtggaaatggacccccgttaaaggaatagatccactaaatacatacttaagatactggagtgtttgtaattgctatcttcataaattcctgatctcgtcatgcttctccacaggggcgatgagcacttgatggagtagcttctgaatgtcctccttgctattgagcaaacagtctaacgaggcagtgctcacggtattcgtggtaccatgttgatgccgacctttccttgcagtaagcctcccagggaaagtcagtcctctctgatccctgcaaggtgctgaggcccagtctccacagcatgaattccatgagctcctcccacgctccgctccccggctctgcaaagcccagggtgttctagtgcccgtgtaagcataggtgctgaggttgggaggcacccctcaaaatgaatttctccctatcctgcctggctttccgggaaccctggacctctgaaatcattgaataggatgctaggaaattctgcaccctgagttaacttgggttccctttaatatgttaagcacacagtctctgccctggattgcaagagataggactgggggaggtggggcagaaaaagctagtggtggctgagctacgtacgaagtcctgtctaaccccaaggccacgatcacaggcctgacacatccagccacgaaaagcaataacagagcatcccagggtggctgctgtggagggcgtggggctacctgtcatgagtctcgtgtacgatgctttgtgcccacgaaggatttgcccaggcttagtggcctctgtgataactccagtaacatctatgctggtgagcggggaagccgcccgtcgctgttttctagaacaatcagagctcttcagctggacttcaccctccaccacatcggcccagggaggctccgggagacaggaggaagacgcagcctctgtcctgagcctctgaaggtaaaaccacatgaaatgaaactccctggattgcaggagcctgaagaccccctgatgaaacctcctcagagtagagagcccgcctggttggcatctgttttagcaaaggtacagaagcagcctggaaagctgagagattgtgctttcgacgcccggaggcccggctgagggaggtccaggccagaattaaaataaaccaaaggaacaccggttttctgattttaaatctttgaaactgttaatcctagattatcaaatgcaaaatatgccccagccagaaatgcaaagctcccacttgcccaggtttggaaccaggactgtgtttatctgtccttggttatcctggctgctccgtgagccgcaatgcccgcgttcatttgttaaagcttccacttctctcaatttacaaaagaaggtttaaggaagcaatttcacttggcctcggcaccaaggagcttaaagtcgcataaacccagggaagctgcatttcagaacaaactaggaggttccccaagcggctcccaggaagtccaggagcaagcaccccgcagaagggcagctggggggccctgggtttgtgacctggagtctgtcccgtggcagccttgggaagaagcaggttatctccaggaggtgccaccatcatcttcccaaacctaaacttaacaattgtctttgctttcatcatcatttgcctaataatatttcccctctgtgatgttcacagaggataaaacacacagcaagattaaagagttttctcaaatcgctccctgattttctaaatagaaaaggggccattctggtagcagagttcagctgagattcttaggaaaaaagcgatggagaattctattttccactttcttaaacaccaaacttattttcttttatcctatgagatgttaattcttataataactgaggctattatatatgtgcaaactggagttataaaaagtagctactatcacagatagaacccattctctctgctccctgagacttattcaaacaactgcttgagccgaaatacgctccatgtgtttcctgccatgggtgagtggctggggagggctcagaagccaccctaaggcaggcgggcattggaggggatgatggcgcttgggtgaatcgcacgttaaatgggggggggcggtttgtgggtttgccaagggggcagacaccctcacaggcctcaattcatcacctgccacaccagtggggcatgacccgctgctgacacagagctgggcccaggcctgggacactcccatcagcaggcagccctgagctcgcccgcatccccatccccctgcccggtggggacgctcaggggtcatttatgtttgttccctgtgtgtgccacccattctcatttctgcaagttaattcgatatcatggcagtggcttggggtaaaaggtgccagagaacaccagacagcaggcctgcacctacaggaaaggcttggccgccgcatggaagagcatctgtttccgttaaagtgaaatgttcactccttggctgggcacatggcgacccccactttgtctgactgtgtttcaccagccaaccgctggtcctctcccaaacctgctgatacctctatcccctacatccttgggcgcagccctgatacctgagtctgaaccccaaatcacatgtttatgtgagctcttgcaggagcaagatcaggaccccaaggcaggggcccccgagtgagtgcccctcaccgggcccagccccgctaggtcccgggctgcacccagctctcacctctgtgccttgctacgctgccgcctctgcctggttgctctctgggcttagcctacccagatccgagctctgccttgttcccagttggtccgggaaggcttccccaccccccaaatggatctgctggggcctgaaacactcctaggcccacacaagacgcggaaagcaacttctcgcttttttttttatttttatttttttaagagacctcgttctattgctcaggctggagtgcagtggggtatgcgctcctcctgggctgcctgtcctgcgcactttgtcaccttcccacgtgtgctttcttccacactgaacagtgagtgccccgaggtcacaggtgtctgcgcgttcatctctgaatccacggctagctatgccggggcatccacacgtgccgcctgcctggacagtgggtcagcaaggtccgttcccaccagcagggaggaggccaggctgctgagagcaagggcttgaattaggaactgggttagagagtggaggccaacgcactgcgaatgcctgggttgtctcccaggaggccatagggagccagccagggttctgagcagcagcaggacacacgctgagctcacagttgggacttcttgacctccagtaacccaggaatttggatcttgcagggtttcagatgaaaacagcctcacacctggggcagctgccctgtcacctgcactttcttttttttttttcttttcttttctttttttgagacggagtctcgctctgtcacccaggctggagtgcaatggtgcgatcttggctcactgcaacctctgcctcctgggttcaagcgattctcctgcctcagcctcccaagtagctgggactataggtacacaccactacgcctcttatgttttgtatttcagcaacactatctcacatcacgcagacagtgaggagggcttggcttcgaggctgcatgcccttgctggggtgtgggggaggccctctctgcactgtcctcccaacccatccaggcctgattctgggctttacttggtgagaactgccttccaggtctctaggtcagaattccaaaaagtgggaacttggctgggtgtggtggcccatcctgtaatcccggcactttgggagctgaagtggaaggatggcttgaggccaggaattccagaccagcctgggtaacatagcaaggccctgtctctacacaaaatgtaaaagttagctggacatggtggtggtgtgtgcctgtggtctcagctgcttgcggggctgagacaggaggattgcttgagtcccagagttccaggctgcagtgagctatgattgccccactgcactccaacctgagcaatagaacgaagtctcttaaaaaactaaaaatttaaaaaaaaaaaaaaagcgggaagttgctctccgcgtcttgtatgggcctaggagtgtttcaggccccagcagatctcttggggattccaggatggtgggcggaaaggagcaggtgggctttccaggcagccctctgtttatccacaccccctgcgccaccccacccggcagtccaagcagaaggtgacgcatgtcgtcctaactgatggcacagagagcagggggctctctcggacctctgcttatcctgcgtcccagcctggcctgcaggggctgcttagggtgagcccttggaactgtcgggagacctgctggcactttctgaggtgggcagcacggcaggagccatgtggctgcgccccacatgccctgagcagacagaggaccctgtccagatgggcttttgggctcactgctgcagccctttcccccatccttgagctctggggtctttgtatctgcaaggatgtcacctccgcttcccagatagaccccctcagacagccccacggccaggccctgtagggaccaaggtaagtggacacgagagtgcatcagaagccaccgcagggcagctgaaccggtgctggcccagaaactgcccccttctaagaaagagagagaaccagagcacatggatgttggcacatgctgctcggcttccagatgcatgagcacgcgtcgctcgctctgccccgggagcgttccatgcattcgctcgctctgccccgggagcgttccatgcattcgcattctgcagcctccctccacactgtgattttccacgtctccccaaatgcgtcattaagatgatcacatgcatttacaaaggcggccgggctgcagcccagcacccgcttcatgatgacagcactgcacccccagcactgttttgccatgatttagtacttgtgtacaccagttataagaaagtatcacttttgatagccttgtgggttttctcccctccgctgctgattggtataatttatatgaaggctctaagccccctgccaggctgggactgctggtgatacacatataattacaaacccttcttcccagctttgtgaacttcgaggaggaaagacgttttaaaggtgctgttttagttgtgctgatgaaatgcatattcatttagggggcctggtggttatttagctgttattgttcagcaggcctggtcctcaggtaccagaccaggcaaggagacacagggtgcggggctgctgatctgatcccgcgaccttgagctgtgtgcacacctgcccgtgaaaggccttgagccaagcccaggggtggccacctcctgacttttcccggggaccgtgtctggccacttcctcctcccgcactctcccatcccctcagctgcaccttgcttcagactcggggggtcctgcctcccgctgtggcttcctatcctctccacttgtcttcccaaaccggttttgcccagagggcccaggtcacttggcatccccaagaccgccttccacctacacagcaaccagcggctctcactggctgctgcctggcatgagaacttggcatccccaagaccgccttccacctacacagcgaccagcggctctcactggctgctgcctggcataagaatgccctgtgtccgtgggggacgtatgcagccactgcagataccactgaggccaggctggtgatctgagggacagccacgcagctgcgggcctccgggcacctgcccacctcaaggccttcacattcagattttttaaaacctgttctggtcaaaccaaagtcacccaaggaggctcctcagcagccatttgcccaagggtcactctgtccacaccgatcctcacgtcaccctcacagcagtcccactgcacccgctgagcagaggggagctgaggcggagggggcaggtggaagttgtggccaggccacggggctcccacacagcagtgccagcatcgccgccccccatccctcttgtgttcttgccctcgcagcccctcaaggcctggaggcagctttgctttgaaacccctgggttactgcatacaggagctttcccctcccaagaccctcatcagctttctgaagccaagttgcctctgccctgaccttcaaaccttcccaggatcagctcaaggcagccaggcagggaggctgtgcccccttcaggcccaggaccctctgtccacctggggaaatatgacatgcaggtagaaataggacaggctttgcggagtgaaataaaaatccttaaaatcctgttgtgtcctgggctccaggtacagtgctgggcctcagcatatcctgtagttctaggatttgcggggcagttcccgctaccccccgccccaaagctttcaccccctgccagctcccactccccaagatcccaggtccctagatgccactgtcccgctccctacccagcctccacctcccagatcccactgctccagtcccctctcactccctacacagcccccaccccagcccagatcccactgctccagtcccctcactccccatgcagcccccaccccagcccagatcccactgctccagtcctctcactccctacacagcccccaccctagaccagatgcactgctccagtcagtcccctctcactccctacacagcccccaccccagcccagatccactgctccagtcccctctcactccctacgcagcccccaccccagcccagatcccactgctccagtcccctctcactccctacacagcccccaccccagcccagatcccactgctccagtcccctctccctatgcagcctccaccccagcccagatcccactgctccagtcccctcactccctacgcagcccccaccccagcccagatccctgctccctgatgttccaggaggcagaaaggtccagtcctgcaagtgaggaggacgcagttaaggagatgtcacctcagccaaaactgcttccccgggttttgggcttacacctgtgcttcctgaaagacccttgggggggtctactttggatctacaggaaggttttcctctcctgggaaaagcaaaggaaaaaatcctacaattgtaatccagctcaattttacaaccatttcccaggcacctggatggcctgggtaccatgtacccgagagagatggcaggagataagtgttacccagacattaatgagtaacacaccctgtggttctccagccaggtgggcccttcagggcaggctctgccccgcctccttgtgtggggtgcagacaggattccccaggctcttcatgagcaagtggggagaacgttccacccagcgagtgatgggtctgaaagtgatttttggcttggatagttactagattttgtttttccttctttaggaggaaggtggggctctgcgcttttatttttaaacttcatctcattaatgatttacttatttgcagtaactctgccttcagactttctaaggcctgtgctctaacgtactgatgaattatgtgttcattacgtgagtcctgcataaaaaacatctcgatgcctagaaaaattgcttgtgtaatggaaacctttgtcatttattcattttaatataataaccgtcttgtcttgtgggtgagtatgattatcgcacctctgatgagagcaataatgtgggagacagtcgtttttacagagcagagctattgctgtgtttagattatcagaatttttattatggtgctaaaataaaactgataacaggggaaaagtagcagatacacctgtagttcccagggtgtctgaggcagagagccgcagcgaaggtgtggttcggcgacctcgctatcgatctacaaggtattccgtggtgcctcctctgtgcacacagccacacggcagggaggggagggtgccaggtgagggacaccatggcgtcatctgagggtggagcagtcagtgggaacatctagaggcacccccgacgcccctgcttccccatggagcatctgcataagtacttctgggcttcactgagtttggggcgggaaaaggtcaattttcatcaggtatggcccaccaaagggcactgagttcatcaaaaggccagctgcccatctgatccttctccctaatggacgagggctgcctagcccaggtcagactccggccacaacagggcatgccttcctcccgtgatctgtgaacacagtattgccagaggagcaggtcgaagatcccaggtaacccaactgccgtcacctccagcacaggtgtgctggccagggcttccagagaagcagaactggggaatgcaggtgcagggagaaggagattccatttaaggagttagctagggcgaccatggaggctggtaagtcctaagatctgcagccacagttccggtcccaaaactgtctgatggagaattctcttgcttggggaaggctggccttttctttctattcaggcctttgactgattggatgaggcccactcacactgttgagggcagtctgctttacccagagttggccagtttaaatggtgttggtgatggtgatgatgatgatgatagtggcgatggtgttgatggtaatggtggtgatgatggtgttgatggtaatggtgatgatcatggatagtgatgttggtgttgatggtgatgatagtggtgatggcgttggtggtgattacagtgatgatgatggcagtgatgaaggtgaataataatgtgatgatgatgaaggtgatagtgatgatggtggtagaggaagagaaagctgcagccaccttgtcttgagcacttcctatgagtcatctgaattacaaacatctttgttttaatcctgtcaagaattttcatgcagtaggtgtcatacccactttatagatgaggagaccaagaattaagaaggtcaaaacttgtccaaagatacactaaaatgtggcaggatgaggacttgaacccagagctctttgtatcccaaacccatgcttatgattgttgacatggtatcttcaccgtgaatttgtatattttgaacccaactgaattgctaaatctcttggtgtccactgaagtctttggtagcacaagaatatatgtgtgtagaacatttctgttgccagttcatgtacattatttagaaaataacacatgctattctctgctaagtaaattttatgccaaaggatgactctatcaataaatactatgtagtaaaaccatgtagtggggcggctttctttatgtgtaaaaggcatgttttattgagattgaagagacaatgtcttttggataggtaaggaactgttggagaaagcaaagtcactaaggaccattattttgtttgccactgttaaacacgtcagcctattttctttttacattactgttttctaccagatgtctagagcaacaggctccctggaaaacctcctcattgtccaccacagcttgagggtcatggtgcttcgtgcccactttctattggagcatagcctcatcccctcctacactgtcctcagaagccattcccattgtctccattgtcaagtacactgtccttagaagccatccccattgccaccttgtcaactacaggtgtctggtgggtagctggattcatggataactggtatggcttgagatgagtgttggctcttgactcttaaaaagatggataaaaatacaaaaaaaaaaaaaagatgcctccccccaaccccagcgacatgaattaaatggatcaatgatggtggagaggcaggcgagaattaaagcagagagactcctgggaagtgtcattacagggtcacaggtctcacctaaggaggtgaaattcccatccttttttccctatgctgagccgtctgccctgttagaagattctgtgtacgcatatgttcatatttctaatattgacatcattaacttatttggaattaaccagcatgaacacttggtagaaaagtagtcttgataagaaatagtaagccagtaccaaacaagagatccaggtcacatttaatccagttgtagtgatatctagaagaggggggaaatcctttcctgtgaaggccttttcatctgcagccttttatccgcttagtctgtaaaggagacactaagttgtataataataccgggccatgtgccttgtaagaacaggcttaaccctcctcctaagaccacaaagtgaatttaaattttctgagtgttgacagctgaagcatgaggtttcttcaaggatggtgttgaaaagtcagatcgtctttccaaacctcactcctttcctgggaccccacggccactttcgttatcccataacaacagctataactgggtttatggcatgggttgatttttctcactctacatagtttgtaagttggtgatttttttttcctttcatccctccttcattccttcaccccacgactttaaaaactatctttataggccagacacgctggctcatgtctgtaatcccagcaccttaggaggccaaggtgggtggatcagttgaggccaggagttcgagaccagctgggcaaaatggtgaaaccccatctctactaaaaaatacaaaaaattagccccgcatggtggtgtacgcctgtagttccagctgcttaggaagctgaggcacgagaattgcttgaacctgggaggtgtagcaagctaaaatcatgacagtgcactccagcctgggcaacagagtaggactctgtctcaaaaataaacaaaaactataataacaccaaaatagactgatagacctagtctctagctcttgccccaacaccaagctcactcctaagaatgttactgagccctgacgaaggacaaggcactgttctcagtgcctcgtataaagatctcagttaatactcacccaaactttggaaggcgagactgtatttatctctgatttaccagaggggaaactgaggcaaagaggaagttaagtgacttgcccaagattacaaggcagaaaatggaagcagaatttgaactcatctggtctaggcccagagctgtctcccacctgccatgctccaaggcattgctgttacatggtcagctgcctacttgattctcaaacttttcatgtccaaccgaacacctgacttccctccaacaccatctcacactccccatgggcttccccaaagttaatggcagctctgccctcctgctgctctactcaggaccttggagctctgcttgatgcctctcttcgcccacatctcacatccgatttgtctccagattttgtcaactgtaccttccgaacagatctagaataggccgcctctcccactgccacagcgtgctctgaccccagccaccatcctatgttattgccgcagcctcctcacggtcctccctgcttctgcccttgactcttcctgcaagccatgcagcaagcccaaggggtccctctagaatgcacgtcagtagtgtccccttctgctcagaactcccagatggtgtcatcccttctcgtgggggtggaagtcagagtccctgtgaggtctccctgggcctcttgggcataacctactcccatttcctatgaactttctccttgcttgctccacatctgccatcctggcctccttactgccctcggccatgccagctaagctcccggcccagcgcctctgccttcccaagcactcttggtcttttctggctggaatgctcttgcctcaacacccacgtggcttgtctccttactccatccaggcctctgctccagggccaccctgtcagagaaggccttgctgatgcccttatggaaaaccatgtctatgagaacagcaccaccagcccctgtgctaaggagaacatgcaccagcccctgtgctaagctagggcggtgatgggggtgggggtggtttcaagaataacacaggtggagattttatgtaagctggtcagtattccagagaaggaaacattttcagcaaagacctccacaaatgtttgttctcgggtgaattaagtaagtcgctatttcacacctactgcatgcattagggtgtgctgggtccttcgagacccgttgatggcctaggatagcattcactcaccaggctgcccaccttgctcacctggtggcctcatggcctcctacctgtctcctcacctctgctcttggcccatccagtgcagaggttctgcagtccacagagaggtctgaagacaaaaccatgatccgggaccagtaagttaaaaaagcaaggtagaggaaaatgtgcatagctattaccatttaagaagggaaaagtgtgtgtgtgtgtgtgtgtgtgtgtgtgtgtgtgtgtgtgtgtgtgtatgtgtttccttattgtaaaaaaagatacaataaataaaaaatgaacaaatgtggggaaggaagaggccaggatagaggggatagaaatagaagctgaacgtctcagaatagacctcggtggatttgactttgaaagatttttacaaagttatcttttacaatacattaacaaagcaagccctgaaaatcaaaagcaaaagggaatcaacgcgtccgtctatcaagttggtgacattgctacaccggtgggaattattttaattattttaagtgactttaagacgtgataattttacttacatattcctggtgggatatagtccaagaccaaaaagaaaaatcataactactttcagtaaccatgttgtttgggatttattggtattgctattttgagactgttgtttgtgtcctatggaataaagcaaatgaataagtattgaggaccaggattattggtatgggagaaaggagacacagatgtgaaatcaatgatttctactaccttgtagtcctcaatttggttttaggtattaatgtgaactcctgatatatgacaacttttttaaaaaatgtatttcctagctctatccattatagagaaataaaagaccagcccaatagcactgaacacccaagcccctaggctatggcctctaaagaccgtttcctaccaagaggaatcagtgcttcttagagaaaatttaattctaggtaggaaatgtacaagatgagaccaaaacactttgtcacaccagcaggcaaatgaacactcagagacgacagggtcacaccaacaggacacccaggtcaacttgaagatgctcccactggtcaaaatggaacagtttctcagtgtagcaattgcaacagatggaaatagatctagtaggttagattcttcaggattctttacaaataaataaatctcacgggtcacccttgaggaagctaagtaaccaactcattattttgaaaacaggaaaataaagcaaaagaactaagcattttcctgacatttctatatgcccactgcctcaaggtaatatgacgggaagttgcacctcataaagttttccacctgataaatgaggtagaggtgatgaaatatttctattttgtgatctttaatgaaataatgggtctagacaatgatcattagtggctgctaacctcccaaaaaattgataaataaaagagagacagtggcaacgagagagaccaagaaaaagagagaaaacagacattacccgcatctaacgaaagcacccaccacccgccacctgtgaagtatttgcctccccccattacacatgatcctgacctggcctctggatcttaccaccatgtgtaggatacaaaagagagggagacagattaaatctcaccatagggagaagccagcaaaatccagtcctggggaaactgtaggaccaacgatctggtttcctcaacacatgaaccacaagaagatagaaagagagggaggaacctctaaattcaaggggatctaagagcacaatcagctggtggcagtgtgtgccccaccttcggaatcgacttcttgctcagaggtcctgaggggagggtcctgaggaaatggactgcttcccaaggctcttccttccctttgctgatggcctccctgtgggagtcctgcaggcttggctcagctcccagtctctgcacttcacttctgtgtggccttggctcagacactgagcctctctgtgcctctgcttcctcacttataagctaggcatgattattttacctgcctcagcgtatgcttgtaaagataagataagcagtccctaacctttttggcaccagagactggtttcctggaagacaattttcccatggacccagggaaggaggatgcttccgggatgaagctgttccagctcagatcatcaggcattagattctcacaaggagcgtgcagcctccatccacatgcgcaggtcacaacagggtccacactcctgtgagagtctaatgccaccactgacatcatgggaggcggagcactggaggctctggcagtcatgctcgcccggccaccactcacctccagctgtgcggcccagttcctaacaggccacagaccggtaccgggttggggaccctgctttaagcagtcgcttctccttccctggcctcgcccccagcagccaataacgtacttcctgtctctatggatttgcctgtcctgcatactttgtgtcaatggaaggaggtattatgtggggtttgtgtccggcttctttcgctgagcataatgttttcaaggttcagccatgctgcagctcgtatcagaacctagttcctttcagggccaaataacatttcactgtgtgggtggaccacgtttagccactcagcagctgacagacacttggcggttgcactttggggctgttgtcagtgtgctgccgggcacgtctgtgtgcaaggctttctgtggacagatgttgattcttagggtgtctgcccagcagtgggattgctgggtcacgcatgcagcagctctgctcgcctttctggaggccacgagcctgttttccacggcggctctgcgggcctcctgttgaggaagccctggcgagtgggggctcctctgccaagcattaaatacggactcaccactggggacggacttggactccaggagcccccaggaggctccctctgtgccgacgcccgtgggctgcagacgggtgggtgactgtgggacccttgctcagcctccagctttggggctgatggctctgcccccagggagtctgtgcagccctcctccagaccccagtccccttggaccaggggcaaagctcatttccctcatccctcccgcccctagcctgctggggtgggagggacgaggctcctgcccggccggccctggggctgggaggcaggtgtgggaagtgcaggtgggtggtttggtgtgtttggcaagccgacccaaactcccattacatgctatggaaacccttgcaggccccagatctctaaattttttttctgtcccccacagccctaccttcatggggactgccccccaaccccactcccgcagttctacccccatgccccacccccacacccgttcatgtgacccagatccatctccttggagccccccgcccccaggtgaaattgagcatgcctcctgttctcactagacagaggctccgagggagcaggcgagtcctctcttgtcagaggccacatccctgcacctgcgcagcacggcacatcctggggctcagcgtcctgcgtggaacatactcaagtccatccacatcctctgcctcagagacagcaggccctaagcgtgcttccccgggaccctccctgggcttctaccgcctgccacactccacctgtccccctgcatccaggagggcagcacacacctcccggggcctctgccatccggcccagggccaccacctcccaaggccccccaggacctggccagcccaggttgccccgtttctgctgctggtgaggtggggctgggctgacaggaaccccaggagatctgcagcggccccgcctcccaggcctcccccatgctgagcttgcccacctcaacagacgccctagcgtgtgctccggagagacactgaaatgaacttggtcccccttcctcacccattaagttcttcccccgaggccagaatccatcgcaggcaggccctgcagagcggcaggagcgggcggcgctggcttcactccgcggtcatttacttccgcttctgggcgccctttcttgcctctacacatcttgctcttggtcgcacgtgctgagtctcggagctgcaggagcttgccaactgcccacctccgctcctctctcctgatgccctgtttgttgatggtgcaggaacccgctgctgcagttaggaaattgaaatgtcagtcgggagggctcctggagtggggtttgaagctgagctctgaaggcctcgagggcagggaaagggaagaactctgggaaagagggccggggtctcgcccctcctggaggcactggctaccctcaactcttgggggagcttttgtgaatggagtttgcttgaaatcgatcttctcagcctcctcaccagcctcacactggcgttatgtccctggtagaccaggcggccaaagcttccttcctgtggctgccctgaccacatctggcactgggaacatgccctgcacttgaggataaataaaagtgaaatttcaattaaaaggataaatcatggtgatgggtcctcgtggtgaccagcaaagacctggcccacttccaggctgaatttcaactgagaagcagccatttctttgtaaaaagttgtccattttagcgagcagtgaagtctcgagggaagagccccaggcctctgttagcagagcctgtgctcaaatccctgcacctgtagagcctgcaccccctccaggacgggtgagtcccttggccacagccaggcctgacaccccgaatgcgctactccctgaccttccattaataccagcttttcgctagcttctggtcttatgcttcacctgaaccatgcagcaggtccctgtcctcatcaaactttgatgccgaacaaagcaaatgtccggcaggccacagtgcagcctcctccccctcaggaccccaggcccaccctgcacaccctcatgtggtccctccaggctcctgggcggggtggggggacagggatttctccgcaacataccacccctgcagtgggattcccagcgttaaggggagaaggtgtcactggcacgtggtgtgcacaattctgaatcctccagcctctccagcatttgccttcattcccacagaggccgagaggctcatggcttccagaaggctatgagatgtggcacaggcacccgacaggtaggactggctggaagcctcgggcctgggcaggagcggctggagcctgcctgcatccacttcctccttccatctcctttgaccaggagaccaccttgcccactcatcctgcaagttgggtggatgctgctgccaacccaggcctggtagatgtacccattccaacctccagccatggcagctgcttcaaggctggggtaagagccaatgagtgtctgccccaggacatttgacggagctgtctggaaacagccaccttccctactgaggcagggagctggtgggtcagagcaggggcactggggccaggacacctgggttctggatcccagctcaagggcttgtgagctgtgtgatcttgggtgagtgactcaacctccctgtgctgcagtttcctcatctgtaacagggaagggctgcatatgaatggccttgtctgtattaacggcactgccttgggttgtggtgatgagtaagtgagtggatggatgtaatgtgactagtgtactagttcattttcacactgctgtaaagatactatccaagactggatagtttacaaaggaaacaggtttaattgactcacagttccacagggcttgggaagcctcaagaaactgacaatcagggcagaaggcgaaggggaagcaaggaccttcttcacatggaggcaggagagagaagtgcgagcaggggacacgccagacacttatgaaaccatcagatctcgtgagactcactcactctcatgagaactgcatgggggaactgcccccatgatccattcatctcccaccaggtctccctctcaacacctgggtattacaattcaagatgagattcgggtggggacacaaagtctaaccataccacctggggtactgcctggcactgcaaactagttagggaagcatccgttgtcattaccatcatcactggttctacgacctcttatttctgtgcccctgacactgatgctattactagtactgtcaaaattgtaatgtcagcctattgctgttacccctggggctgctaggctgatgggatgtaagcacagaagtgtgaggcagcagaaggggagagagtacctgcgagtctgaggggtgggctgagcaagtgctgagagccccgtcagaatggtcaccctcataatggactgagcacggtactcagcccccatgagtgagtgaacacagtactcagcccgcatgatccagccatgcctgaaacccacaccactccaggataggagccagcacattgcctttttgcttgagccagttacattgggatttctgacgtttccaatggacgagacctaaaagtgccatcatgcagtaaaaacctaaattaaatcattttattcttgtggtctgggacctccaggctggatatacagatatttattgccccttgtcccttgtttcattcaatcatccactctggtttgcagagcactttctgtgtgtctactagtatgcagagctctccgggggagacagcaaacatagtattccggcattattactgattaaattaatgattaaaccaatattcagcccacatttagtgacatagcatagtactcaggcctcattactgacaacacaaaaagcccagatttattcacaaacatcagtattcagccttcatttattgacaaagctcagtattcaacccacattactaagcaagagtactcagccttcattactgactgagcacagtactgagccctcataactgaccaagcacagtactcagcccttataactgactgagcacagtactcagcccccatggtgactgagcacagcactcggccatcagcatcgaattacagacactgcagatcctcagttaccatctttcatatactcttggcaacagctctgcaggctggatttaaaaaatcccatttccagatgaggagataaaaccatttcccaaagtgaagagccagtgaggaggcgccccctcctcttcgtctatgggagcactgcctggaggcacagggtgcaggagtgggagacatccattctggcaggtctccttcctattggcccagcgtgggtcacatgtccttcctagccaatcacagtgcccagggaggtgcactctcattggtccacgtggggtcccatggctgtcctggggccaggtgggatggttcccccacacagtccatgcagagcaagggtgggccggggtgatttccaaagactggcagaagtgggtctcggcaggcaaagccagggctgacggcaacctccttctcgggcctgactccagcctcatggcttccttgctgcccctaaatgccctcctttgctgccccttgccccccctcactcagctgcctctccttctggggcctgtggcctaggatctggggcctggggtctggggtctggcctccatcttttctgctggacactggcccccttgggctcccactacacctgcacctgtgctccagcccaggcagggtctaagctccctgcatcttccagcccggcccccaagggacaggaccctgctcccgtatccccagcagtgtggcacatttacaggggcagacaggtcctgttagaggaaagtagacgctgtgtgacaagaccttccagagacaggtggggacgcgtgcattaaatatcaatgaaggttttctgacgagactcctgacttctcatgttggagccagaaaatgacagggactaatcaggggatggcatgggcgacacctctgagggcgaacacgctgcgctacaggttgacacttggcgctgcctatccccgcagcctcacgggctgaaacaacaaagaacccgtctcggctttggacttggctttagctgtgtggctctctgataggcaggattattcctagcccgagtcagaagcagaagctgcctccactctggcttctgtgcagtgacagctcttgttagccatcaagttcaaggagctccttggacgcctcacatctgccccagacagttttcagagagtctctcactcttctgagcagctgtccagacaccgctggaggctggtgctgtgtcgtcacagaccggcttcctaagcttacagtccagtgggcgagacagaaagaatgcaggcaacaaaataagaatacagagttcattttttgtcttgttttgttttgttttagagagatgtgggctcactgtgctgcccaggctggtcttgaactcctggcctcaagtgatcctcccgcctcagccccctgagcatctgggtctacaggcatgtgccaccatgtccaactaagttgttgttgttttttatttgttttttattttctttaaagacagggtatgttgcccaggctggtcttgaactcctggcctcaagcagtcttcctgcctcagcctcctaaagtgcagggattacaggtatgagccaccgtgctggccagtgttcttaataataaaaaaaatagctggccatgacaagggctaggatgacaattccactgggtgtggtaggcactgctagtgtagccaggtcccctgggagccagccacccagcccctgccatcatgaggtcggcttctttgctaatgattcacagctggacacctcccagaagacggagtggggctgggaggtgcctgggaggagggtcggcccacagaggcagcctcctggcctcaaggctcagttcatacaccagggcttcccgtggggtgaggctgaaatgacccaggctgagacatcactcgtccctcccgctggttctaggggctctccctagtcaataacttgtacgagaatccctgtcttgggctctgtttatagggaccccaacctaagacacagggatccagaggtccaggtgggcctctctgtggctgaggcccagccctgagcgccacagtcaggtcgccctctggtcagctctgtcctgccgggcactgtgttaagggctccccagacagcaccaggtcaggcaaaggcttcagcttgctgcacctgcaaactccgactgtcccgagcggaaggaccctgccagaaggaccctgactacccacaggctggaggggaaggccggccggttgggtgatcccagggctctgggtcttgaccgggctctggcattgcaaggaagggctccatctgtgtttccacactggactcattcttgactccaggtccacattggtgagagaagctgattgacccagcttagctcctgggcctgcccatcggctacggggagggtgaggcacgtcggttgtattcccaggaccacttaccatgggagaacaatgacgcccccggagtgaactggcctttgtttccagaagagccgggagagtctcctgcaatcccatgccaaaaattcaggaggtgcctctctctgttaatttggtgcacactgaagggcatttttgagaaggagctaattcactattccccaccgggcagatctgtgagaacatattcatgccttttattagcattcatatgactttgaggggctttttgtcattgctaaaactcaaagtatgtgtgaacagttctgtatgatggtgtcaatgttacacaacaaatgacttctcacttcacatcccgggcttttctgctcattacaagaacctaattgaaagtaattgaaggctgaatttcatcatgcatgaaaagtatttcggaaaatgcaagaaatacaaacatcttcaaacctcttaagtaatgttcaagaatcaaggaagagttggggggaaaacaagtgagaacccttacttggccccacatttgtccaattaattttatgagaacaggtttcacgtcgccgaatcttgctggttatccagtaccatggcaagggctttggaattacactttgcatcaacctggaagaatctcacgctggacggggttacaattttataatcactttccattgaagtaaagttctagtccaggaccttggagagagacttttaaaagtgggggtagggggtctggcacactggcccatgcctataatcccagcactttgggaggctgaggcaggaaggtcacatgaggccaagagtttgagaccagactggccaacatagtgaaaccctatctctacaacaaatttaaaaattggccaggtgtggtggtccacactctggtcccaggtactcaggagactgaggtgggaggatcacttcagcccaggagttgaaggctgtcgtgagttgtgattgcgccactgcactccagcctgggcgacagagcaagaccctgtctcaaaaaaaacggggtttcacttagcacttgcatcccccaaagctgcatttgtagagctggtgggagtgagagaaggggccaggatgttcgtctcctgtggagcatccaggggcgctgagaagacactcagaccctgtggatggcagggagggaactcttctgaccccttccagctttcagaggctacttaggccagcagtatgatgcggaaacaggagctgggaactctgcccgggtcatcacttactcgtgaaccttcgtcacatccctcagcttctctgggcctcagtccctccatcttcagaatgggctctgtgagatggtcaggtggggctgacgctctgagatttttttcaatggtcccttaaggaattccaggcgtggagggtagaggtttctgggtctcctcttctgtgcctgcttcagggtgaatgaggaggcttctgaggctgtggtgaggacacacaaggctgggaactgtgattcccagggacagacacagtgagaagcaggctgaggaccagccttgggaagcccccagcgacgccgttgtgaggggagaacagagcaccccccccgtgggtctgtccctccacaatccgccccagcctccaggagccttccttctcctcctcctcctcatgctctggaacccatgtatcatccaggccagcccactgcaggttgctgggtcggccacatctcccttcctcccctcccatctcccttccctgtggcctcccttcctgtttattttccctcgtgcagaggctcccacattctctctgatcgctccccaagccctcacctccatccccacctttctctgcctgctcaccgttttttcctctgggtctcggggtggccttttctgctccaggaggcctccttagggccaggacagccttgggtttccctacgcagctgggtgactggggccgtctacctgcctgtctgcctgtctgcctgtctgcctgtctcccctgccccttgggctgccttcctcatttcacttgtttgtccaggaacggttgggccctacctaccaacaggccatccctggggactggcagccccgtgtgtgttcccagggcctagagaagggtgtggaggggaaggcaggaggtggggaggtagggagccctcggctgtgcaatgcaggcaggggaacagacagaaaccctgagaaaactctgatgttgttggcaagaaaaccaagaagctcaagcaggagcactggttggggccacggagaagctgcaggtgcaaatgggcaagttgccttcttccctcaaggctcccatgagactcagatcctaaaagaaaattgcctctctcggccaggcacggtggctcacacctgtaatcccagcactttgggaggctgaggtgggcagatcacctgaggttgagaagttcaagacgggcaacatggtgaaaccccgtctctcctaaaagtacaaaaattagctgggtgtggtggggggagcgcctgtagtcccaactatcctagtcccaactacttgggaggttgaggcaggagaatcacttgaacccaggaagtggaggttgcagtgaaccaagatcacaccactgcactccagcctgggtgacagagcaagaccctgtctaaaaaaaaaaaaaaaagaaagaaagaaaaggaaaaggaaaaaaaaaagaaaagaaaattgcctgtctcagcaggccaagtgcaagtccgcctgcctgggtcctgtgccttcgggatggggcaagacggccatggcacctgttggcaccatccagagcttttactccatggagagaggggaactgctccaggcagctcagaactcccaacaggctgcaaaggcaagggtctgcgatctgttttcctgggaacatctctgggcttaatatcatagaaggagaaagctgaaacacctcgctgaagaattacatccttctggaagaacttgatccaggagatttttaaagtgtctttaaaatgctgggacaggaaccaagggaggcttgatgagtggcaggcaaggcccatgaatgcagaatggccgcccctttccattctgaaaggatatcccgccgggtgtgcatgggggagtgtgtgtgtgtattgtgttctgtgtgtgtgtgttcgtgcgtatgcatattttgtgtttgtgtatgtttgtgtattgaatgtgtgttgtgtgtgtatgtgtatttgtgttgtgtgcatgtgtgcgtgtgtgtgtgatgtgtgtgtttgtgtattgagtatgtgttgtgtgtgcactgtgcatgtgtatgtgtgtttgtgtatatgtgtgtatttagtgtgtgttgtgtgtatgtgtgtttgtgtatgtgtattgtgtgtgttgtgtgtgcatatgtgcatgtgtgtgtgacgtgtgtatgtgtattgagtgtatgttgtgtgtttgtgtactgtgtgcatgtttgtgtttgtgtcgtgtacatgtttgtgtatgtgtatggtgtctgtgtgtattgtgtatttgtgtgtttgtttatgcgtttgtgtattgagtgtgtgtgttgtgtgtacatgtatgtttgtgtgttgtatatgtgttgtgtgtgtacatgtatgtgtgctgtgtgtgtattgagtgcacatgtgtgttgtgtgtctgtgtgtaggtatgcgtatgtgtatgtgtgtttgtgtattgtgtgcttgtgtggtgtgtgtgtatgtgtgtactgtgtgtgtgtgtgtgtcatgtgtacatgtctgtatgtgcatttgtgtgcatggtgtgtgtgtgtgtccagagctgtgtgaggcagtggtcaggaccaaactgactcactctgaccctgactttctccaaggccttccttgcccagtgccccaaggggtctcccagaccttgctctaccccgcaatgcttatcctgatgtacaacaacaacttaagggggtgtcactcgtgggagaagccctaattctgagagtgtctgtgtccgtctgcgggctgactgagagagaccttcccgaccgtgcacgtgcactgggacagctctggctgacaggaggccctggtgcaggggccttcccggtgggtgggtctctccctcccccagaatctgggtgtaactctctctccccggcttccacccttgaaagcttagggaatccacctccaaagtgtctgcgattcaaaaccacacagggtgacttttctccagtttcaagttcatttgaaacctggcaaatcctcctgggggagactctgccagaacgtttcatgtcatccagccatttctgagaggagaaccggccttccaagcagaagtccctgggtgaacactatcgcggagtcccgtaagttattttaatgtagacatcactttaaactaacctttcaccatctgttctgtcctctaataacaaatgcggaagagcgtgggtctccacggcatcctaaggcgatcggcgcactggaggcgcctgtctgtgctccctattcacggcccatcgtgggcttctgcggtgtttgtctcatttgccagacacaaatcaagtggaaaactgttctcccctgatctggtggattcactcgcacagtatttcttcttaatatggtaaactgtgggagaattcagagcattttgagagctgatgctcagagcccgtggatgcacatcacccgcagccacccgctgcccgccatatttcagaggcggccaaacgggcctggagaataagcaaatgcggcctgatggccaaaacgtaatgagctttccttgaaaaacaaattctctttaaataggtggtggattattttcagcagtctcctcattaaatttccctatgaaagagggattgattcgcccaaaactagcaatagcgcacagtgaatctacaacccatccttccggctgctgcagaccccgtccctggcgcccacctcctgcctccagaagactggacctggctctgtgtgttctcctcagcccagtgccactcagccactcgagcacctactgcgtgctcccagtgcccttctcctaacccaaagccaaagcagcgtccatactcatcaggcctcggagaagcgcagcgctcccggacggcggggctggtgggctctgtactccacctcagctgcctgctctcctgcgaatgtgatctcttagcttttctcccacccccgaggaacaagtcatcagaggtgacagggagaggggctcctcccctctatctagacgttgccccataccccctcgtgaccaaacttggtgaaaactctccatgggtggagaagagatgggccttgcccatggaaggcctgcaggaataacgttgctggtggccttgggcagtagagggaggggtgattaaggctccgttggaggcttttcccatggaccgctgaggggcccagacccgcccttccctaggtcgctgtctctgaagttctgcttggtgtgtgcggctcagggcagagctgggaaaggaacctacctgatcatgggaaagtaaggaggtgcattgcgggggggaacaaagacgctcctcacagactgtgagtgtgtgcacatgtgcacaggagtgtgtgtgtgtgcgcgcgtgcgcgcaccgtgggcctgcaggcctcctctcctggcgatgtctcctagcacgtgagcagccccctattggcactgacccccatggcgcctttatgatggaaacagcatctccctcttcctatacggaaaacagcttttttctattacgacatgagacagccttggggtggccggtgtgcggggcacctcactcctgcacgtaggaacagctctggtgtgcaaatgcgaaatgctggcttaagaaagatgttctccatcaggctgaattctctatgaattggagtttttccaggggatgacttgctttctttgatacgaattaagctggaagggatactctatcaaacgtgctttgagtctctctgaaggctagcctatgattgtcatcgtgctgcagagatgaggtgcctggcgagaagccagccctctgtctctgaggtaagtgctattcaggcgcgatgaaggaggcttggaagtcactgctgcttctgctggctggcatctctgctgggtgtcacacctatgccacacgtggggcagttgcagtggtcatactgtgtgtcatcagaattcagaatgctcctgcatttcaaggtctgcaagcttcataaaaaccgagtgggctgctttttctgtctcgttctttgctctggaaaagtttcaggaaattccagagcgagctgacctgtcctcagatcttttagaaggaatttcctgaagtcatacggtatctccaggtgtgtgttctctgctagtcaagttttaaattgtatattttctcaaaaaataatcaatttcatacaattttcacctatgcttgcataacatatagagaagaaaacgctttaaaacaaatcttatttttttctcaagtttatcaaagacacagctagtttcctgaggacttttcccctaactacagctctggaatctgttacccctatttttctgctttcagatttggaagtttctgtgtcatctttattgatgactttggtgtctgctgcttcctgctttcttgttcctttccttgtgggattgagcgtttggtttgttggctgtaattccattttgattatgaaaacattcaaggttatgggtttgcaggcactctacctctgggcttcactgtataacagtcgcgttgttatattattattaaacaaaagaaatatttttaaaagcctctaaaaataactttggttcctgttgacccaatggttatttcgcagtgtcattcagatttctaaaaggtcttttttcagttttgttattaacttttaattgtatcatttcagtaaaaggtcctagtaaggccgaatgcggtagttcacacctgtaatcccagtgctttgggaggccaaggtgggaggatcgcttaaagccagaagttcggccaggcgcggtggctcacgcctgtaatcccagcactttgggaggccgaggcgggtgaatcatgaggtcaggagatcgagaccatcctggctaacaaggtgaaaccccgtctctactaaaaatacaaaaaattagccgggcgcggtggcgggcgcctgtagtcccagctactcaggaggctgaggcaggagaatggcgtgaacccaggaagcggagcttgcagtgagccgagattgcaccactgcagtccgcagtccggcctgggcgacagagcgagactccgtctcaaaaaaaaaaaaaaaaaaaaaagccagaagttcgagaccagcctgggaaacatagtgagaccttttctgcacaaaagaatttcagaaattagccaggcgtggttgccagcacctgtagtcccagctactccggggctgaggtagaaggattgcttgagcacaggaggtcaaggctgcagtgagatatgattgccctactgcactccaggtgacagaatgagacctgtctctaaaaaaaaaaaaaaaaaaaattcctgttccattttgttttgggggtatttttggggtttccgctatggcccactgtattatgaaatgttgtgatggtcctgtgggctttgagaaaaaaagtagtatatgctaaagacatgctcaaagttgaatgcaaatccattcattccaccttctcagtttcacctttcaaatctccgtggcctcccccaacttccctgagggaacccccaggctctgggaagcgccactcacctgtggtgggctggtgaccaccaagtccccctcctcattacaggaggtttcgcctcaactgagtgaaagacgtgcatcttgtttttaatgctaccagtgtcctttctgtttcccaaaatcttgtatgaatctcaatctttgctcaaaaaccaaatgaagcctttgcctaacccttccccatcccaagtaaaactcagagtttcgtgtctgcctgtgtctttccatttcctcccccagttagcagccttttctagcttactttggacttgggacccggataaccatcattcaattgttttctaaacaattagaaaggctgggacacacatgcattgggtcctagtcttttctctcactgtggaggttgctctgttttcttgcctttgtctagtcctgggtttgatgtcagaacacgaggccattttataccatcatttccattgttttcatctgtgctgtggatgtctgccaggcatcccgagttctcggtgtatttgctgagttactgacaggccctagacctgcagtcggcggctctcagtgaaaccctgaccaccgactgtccttccacttcccaaagtggatgaaagatcagctgtggtccccattgtacctgaaaatggtcgagctcgaggaactcatgagaggggatgaatgtcagagatcggccccgggcctctcctcaccacaggataacctcttctcgctttgctcctgcctttcagatccggtccgacaaagacaatgacatccccatccggtacagcatcacgggagtgggcgccgaccagccccccatggaggtcttcagcattgactccatgtccggccggatgtacgtcacaaggcccatggaccgggaggagcacgcctcttaccacgtgagtgtccacacccggctgagaatggggccctggggtggcgatcccagccctaccaggccttggcaggtgcccccagcagggccatgcctgccctaactctacaggcagcactccaactttggcctggagcagaatcctgggaagctggggaaagcccaggtcgctgggcactgtcccccgtctaattcagcagggtgggcccagggtgggcctgggaaactgcatttcacacactccccaggacgcaagtcaggcctgggcccacactgggagaactactggtccagaaggcctccatccacgtggtcttctgctttggatggctctgcggggctgggagtcagggtcaccagctgcgatgctccctcggggcccctcatgctgctcttggcccctttctccgaagcacagcccattgtccctcacaccctctctaggctgggacaatagtcctgcaagcttttcatttcctccgacgtctctcgcggcagaaagagcctctgaaaggagagccgcgctgattccctgtcaggggctgtgcacggaaagaaatgctagagagacgtggggctgcggcctcagcttccagggggcgggccttctcctcccgggccgaactgaccctggccgagaggagggggcctgggccatggtgaaagcagtggggagtgcacatcccttcacctcagggtccagagctgtccatcacgtgtaggtgaaggcctcgccagcagcgcagaacaggctggagccaaatcacgagggtcacaccccgacctgcccctggccagatgtgagctattgggcagatgctgtcgcctctcctggcctcagtccctgctcctcctcatggggttgttctgaggactccagggttaaccctggtgaggcgttcagcacaagcccgtgctgtcagggccgtgtgcttctccgtggtaactcgggaacaaccatggaagacttggccccacctgacagtgtcaccttgctcggttccaccttcgcttggcttcagtcagtggcaccgaacagggcccgaccctgcagcttctcacgtctgtgactatttgttttggggttcattcattccatctcgcaccagaaggaggctgcataggggcagggaaccctccggcttttccacgccagatctcaggcccaagtacagagcctggccttcagggggctcactaagcattcaaggaagggagggcgttgacgggagaagatcggttttgctgttggccacagtggcctccctgacagcccctgaggcaccgtctgaagcagggtcggagctggatggatcctggggagcccacttgggaggtggctgccctaaccccggtctgcaccggggccttatcagtccctcacggctgcctcctgggaaggctcacgccttggctgggtgttggggagacctgattgacagtgcctgggcttcgtgtgctgggccccccaggagtggccgaggcagaaccacagaaccaaccagagactccggctgacgccccctggctatgcagcaagagacaggccctcagcatggctgctggctcccaaaacgggctttgggctgccgtcaacacgcgtctacaacaggctcaggaaccggaactcaacagcccttactgccaagaaatagctacggaccaaggacttagggagagacacagacacacacacacacacagagatagagatacagagacagagagggagacagagacacagagagagacataggagacagagaagagagacacaggtaatacagagacagaggcatagagacagaaataaagagagagactgaccgtgagaaacagattcagagacagagacttgatacaagtcttgccacatctagatgtggggcagggggagccaacccttcaactctgtgaattcctgacacgtgtttctgtctgttgtttttttaaccaaggcagacttggagcggggtcagcccacttcttcctggtgtggcattgcacatgcagcctgtgggtgctcgctggggcatccaaggggcaccaggagagctgggtcagcccacttctccctggtgtggcatcgcagatgcagcctgtgggtgctggccggggcatctgaggggcaccagaagtgctgtagggctgccgggtgcctgttgcaggaggactcaggacccagcacttgctgaatgcacagtgattcccaggtgacctgcaccagcagaaggcctcttccttccatttcatcttataattcctcctggaaacctggagctcagagctggccctccctgcatcatccccaatgagctgtttctcctccatggattctcaccagaggcagccttcgcattcccaccaactccccggaaaaggtttcagggctcagctacctctgcacacagcacggctaggggacggggacctccagggccaccactggacagtgcccccttcatgcaccttgaagcctaaggcacagcctgcaacccagcctgggagttctgcccacagcaggggtccggctgtgcagggctagaggttggaatggccactccagggatctgggtcacccacccctctatgattcattcccaaggccctcctctcatgcacaggtagaaattttcaacccaccatgtgcagagacagtggctggcactggggaggaatccagcgcccccaccacctcctgccatgccgtgcaaacatgccgtgtaaacatgcggtgtaaacacgctgtgtaaacatgtgcaaacacgctgtgttagccctttcatattgctataaagaaatacctgaggctgcgtaatatagagagaaaagaggtttatttggctcacggttctgcaggctgtacaggaagtatagcgccggcatctccttctggggaggcctcaggaagcttccactcatgggagaaagtgaaggggagcagacgtcccacgtggcaggagtgagagagagagagagagggacggaggtgccaagctctttaaacaacaggccctggagtgcactcagagcaagaattcacgtgttaccacaagggcagcactgagccattgacaagtgatccacccccatgatccaaacacctcccaccaggcccacctccaacactggagggcacatttcaaatgagatctagaagggacggaacatccaaaccacgccacacacctccattcgtctgtttattctttctgcctaatgcatatgcagagctttgctcagcaccaggctctacccaggaaaggtgcagtgcctctgtagatggtcctgcagcaaacccccagaaagatggggatcacaggctggtggggaccagggacctgggtcccacacctgcaggccccagccctcaccacggatgcactcaggcctcccacactccccacctgagctggccatgaaagaagatgagggagcccagggcggtgggggtggggctgctggtgaaaggtcaggcccacctgccccagccacccacgtggcttgccagtgcgcagacacttttgcacacacgttgccttcccttcttttgtttttcttttgttttttgagacagggtctcgctctgtcactcaggctggaatgcagtggtgcaatctcagcttactgtagcctcaacctcccaggctcaagcaatcctcccacctcagcctcccaagtacctaggactttttttattgtattgtattgtattgtattttttgagacagagtctgacttcgtcagccaggctggagtgcagtggtactatctcggctcactgcaacctccgcctcacaggttcaagcgattctcctgcctcagcctcccaggtagctggaactacaggcacccgccaccacgcccagctaatttttctgaatttttaatagagacagggttttaccatgttggccaggctggtctcaaactcctgagctcaagccatctgcctgcgtcagcctcccaaagtgctgggattacaggtgtaaaccactgcaccgagcccacgttcctgtctatttcctgccccagccctgaggcttcatggttttctccctgctttgaagatgagaaatgcagtcatcccacatcgccagcatctcttgctgcctcctgcacaccaggttctaggagcaagctcgtggagatcattagttttatcatcctcatttcccattttcacagtgaggaatggtgagccctgagatctggctggactccagccttctcaccccttcagggactgcagagtcagcaggagatgcagggcccagaagggagaagaagctgcatcgtctgccaaattctggaatgaagccctcaagttccacttgtagctaatctctctgtcccaccgagatggaggccttggggatgcctggctttcctgcccttccctggagaaggaagcccctccctgcaagcatcacactcctcatcagactccagtgtgaccccaactccggatttccaccttgtaggatgcccaccagggtctttgggggcagctgtgccagccagcaggggtgtgttagttctctgcactgtgtaacgaatcagcacaaacttagtggctgaaacaacgccctatgagttcaccgtgctgtaggtcagaagtccagatgggcttggcttgtgtttctgctccgggtctcaccaggccaaaatcaaagtgccggccagcctgggtgctcccccggccctagggaggatctgcctctaggctcaccggcctgggtgctcccccggccctagggaggacctgcctctaggctcactggggctgtggcaggtctggatccttgtggttgcaggactgaggtctccatgtccttgctggctattcggggggccacagccaccccctgaagggcacctgcatgcctcggcacgtgtctcctccactgtcacccagcaaggtgcataggatgcccgcatgcccttctctcctgcctccagctggagaacgttcagctttcgaaggcccatgtggttggatggcgtccacccagccctgtcttaaggtcaaaaacgtagcccagtggggagggaacacatctgtcttcacatctgggaccagcacctgacatccttggggccatcttagagtttttcctacctccccagtgtctttagatcctgttccattttccacccagctctgtgggctgagggtggcgaggacgcatccccagcctgagtacgctgacgactgtgacacgtgtcaccctaaagccagcctgtaaacattcaaacgcacaacacgcacaagtgctcactgctggctttgcagggtgatgctccagaagattccttgaaggattccgtaagttagacacattagctcacccagccacacgctgtcatcttccgaaagttttctaacctttctgagcctcagtttcctcatctgtaaaatagggaccaagacaatgccaatctcacagattctgatgaaaattggagttaacgtgtgtagggttcttatagcactgcctggccctgagcaaacgcacggtgcgtgttggctgccgatgtcactgatgaagaaagtctccaacacctttacccctcggccacttccaagaccctcatggactgttcccagttccatacgccttggagggaacccacacccacaattaagataggaggaaaagagagcagccaagaggcgggagcattagatcccacacacatctggacagtcatctgtcaacagacacatttcccccgagcgccttcccgccccaatgccagaccacgcccatgtattaatatttcctaatcttgtctcccggaacgaggatagaaaaatgtcctattcaagatgttgcaggaaatgcactctgcgcctgacgctccgatttgcaggttgcagaacgctcggaggactcctccacccatgtttgcgtgtttcctccaccgtcatggtgaggtcacctctctcaggcccaccctgggtgtgcccagcctgagagatgggcaggggagatttctacaggagctgtcaaatgtatttgaatcttttgggggtgaggcagggagtgggacaaggaggacacaggccacgggcagaggcggtatttcctcgttatccgcactcgcgctgctcccgctgctacagatagcgcctgaaactgctttagttaggagataataactttaattttagctcagaattacttttcccccgaggccctgtgacctctgggcgtgtgggaaacacatccatagcaggacggagctgcagatgggtcggggatgggggagtctgcccgcgacggggcggggacagccggttccagcaaccccacagcacttcaggctgtttaaacatgatatgtaaagctgacctggcgtgcgtgcagccacatctcgcgtggcagtctgcagttcctccaggagtcagtgctagcttgtctccttactacagcacagattgcctctttgggtaaagccagcctctagatcttccgtaaacacacaatgtagggggtaaaattccactctggatggttggagccaaaccaaaacactggtataggcatggacacagttagctcctgggtttccctggggcaggcgtggaattcagggcccccctgatcccctgagttcgggggagtggcagcggccatgtgaggcaggccaccaaggggatgatgtggagacccgtctggcatggggcttctctcacggccaccctgggctgggtgatgttttgctgcaaataccttgagtgaggtctgttgtgtccaacttcgagggtgatgtggagttttggcagaaagatgtgagctgaggacacctctggctgaccatccagctctgggtggagaggcctcggatgtgccctttccactccccgacagcccctcagcagccccctcgcctgccggcagcgcccagcctctctgtgtcctctgccttggcctgttcttgaggtctcagctcaagcagcccctcctccgagaggcctccctggcggccaccacacccactgatggcttcttctcttcccggtgtccattgtcccttggatggaagctccagggcagccacactgccttcagtgcacagtaatctagggtccagcccagcacctgccattgcaggcccttgatgggcatctgcagaacaaatgaatgagtgaaagaacaaatccagaacttaaggggtgactctgagaagctcctgcggaaccttccagcccagattcagctcttcccttttcacctcgaagatggttcctgtgacgttcccaggagctccacacaggcctcccggccctgcctctccacggatccccccaccccaccacccatattcccctgctgtgcccaagagctgacagggcacacagacgcagaggagcctggaacttgtccaggctggactctcagtggacgcccaaatgggcccaattcccagcccagctctggcccttgcacaccccgacctgtctcctccccatctcccctggggactaaccttacagtggcaggagttaagcccccgcccaattaggcacaaatgtcttttctgttgccactttgggtggacatcaccccatccaaggggcacctgtcctgctccagacatctgatcagaacagtcggtggctcacggaacagtcgggcaggcatgggaggtcctgggtgggcctgggcctgaccatggggtgttggggggttatgctggcttccagctctgtgcgtcgccccactctgcactctcctgacccccgtttctgcagaggagagagctgaggctcagagaattccatgacgtgtccaaagccccccggcccctatagccaacctgcttctgccatcagtctcctaccccagcaccgcgggtcccaggccgctctcagctgagtgggggtgcccacccgccactgggccctgtctctgctgcttttccagctccgagcccacgctgtggacatgaatggcaacaaggtggagaaccccatcgacctgtacatctacgtcatcgacatgaatgacaaccgccctgagttcatcaaccaggtctacaacggctccgtggacgagggctccaagccaggtgaggcctttagcgtttgcttgctggagaccctgtgggctctgcgggtgcagcacaggccctgagggcaggggagggctgcttagtccccgctaccaggatggtgccacgggacttgggcgcagacacacagcatgcagcagacgtccaccaaagcccctgctctcacaggccttggggtcaagggggttgcagaccacaggtgagaagcgattgcagccacagcagggccaacgggctgggaagaaaacccgggcactgggagtcctggggacagcggtgggcctgggcaggcccctctgtgcagctggcgtgtgggctgggagctgaagcctgaggtggagcagctcccggagtgggactggggtgggctcccgggcaggcggagaggctaggggagcaaggtgcccatgccagggcctggggaggcaacgaagtcagagggctgaggccactggaggcctcccagctaaacgtaagatttggttccaagcaaaacgggaagcgagagaggcccggactccccccacagaggcgatcccatgtgactgaggctgtctgctcccctcagagctgacccaagagcctgtcccccgagacttcactctggcaccggtggtggcgcctgctttttcatgtgtggggccctagctgagcgtgtcatgtcttgcatctctgccgtctgtgactgccaagaagtggacgacccccaccagcagtgaggaggctcaggccggggaggtgaagcagttgcagaccctcagggcgcacatgggttagaacctgggtgtccacatccccacagggctggcacagcccccacctgctcatccagatgctgcaggtggcctggggctgtgggttaacaaaccccagggggcttctgtgtgaggggagcagctccccactgtggctgcctcctgcatggggggtggagaggggtcctctttgggacaaacctttgcccggcttgggttgggtcgggggaggtgaggtcactgaggagacctctgcttgggccacccctaaagtacaagacaccaagtaaatgtgaagttcagagagtcagcaaagcactttaaagtgtggcctaagcaccatttaggacggacttacactaagagagtaatccttgctgatctgaacttcgagtttaatggggtgtcctgtattttcaccagcaaccacacccctggccagtgcccagcaagtgacggcttccaggctttacagaagttggcagtcctgggcaaatgggaggctgtttctgcattgaaatctgcagcacatggagcccagagccagggccagctcccaggggcaccacacgcccctgcaggcccccagagaggggtcagcagcatcccagctctgggactggaaggcaggcctttatcacacctgctcgtggaggtggctgcgtgggcggtccctgggctatagtgtgaacaaggtgaattataccctcggtccgcccccagggctgcagtgtgaacagggtgaattgcactcttggcctgccccagggctgcagtgtgaacaggatgaattgtgcctttggcccacccccagggctgcagtgtgaacagggtgaattgtgcccttggtccacccccaggggtgcagtgtgaacagggtgaattgtgcctttggcccacccccagggctgcagtgtgaacagggtgaattgtgcccttggtccgcccccagggctgcagtgtgaacagggtgaattgcacctttggtccacccccagggctgcagtgtgaacagggtgaattgtgcctttggcccacccccagggctgcagtgtgaacagggtgaattgtgcccttggtccgtccccagggctgtagtgtgaacagggtgaattgtgcccttggtccacccccagggctgcagtgtgaacagggtgaattgcgcccttggtccacccccagggctgcagtgtgaacagggtgaattgtgcccttagcctgccccagggctgtaatgtcaacagggtgaattgcgcctttggcccacccccaggggtgcagtgtgaacagggtgaattgcgcctttggcccacccccaggggtgcagtgtgaacagggtgaattgtgcccttggcccacccccagggctgcagtgtgaacagggtgaattgtgcccttggcccacccccagggctgcagtgtgaacagggtgaattgcgcctttggcccacccccaggggtgcagtgtgaacagggtgaattgtgcccttggcccacccccagggctgcagtgtgaacagggtgaattgtgcccttggcccacccccagggctgcagtgtgaacagggtgaattgcgcctttggtctgcccccagggctgcagcgtgaacagggtgaattgcacccttgattggttgtctttcaggattatgacacacgggtgcatccagtgtcactgaagggaatgaatgtgacattatttcactggaaccatgggcagctggtcctcagccatcccttaaggggcaggcagggggtgagcagattagctccaggcagccaaagaaaacggatgaggacacaggagcccctcgcaagggtgcagatgtggaggagtgggcggcaggccaggcacactcctcacacagataccactggcctctctcccggagacccaggatgctatttaaaggcgcctggattttcctggcctttctatcacaaatcaaacctcccgtgtcttactttttaaaaaatcaatagcaaaagtcttcccaaaagcgcaattggctttgctcattaggataacaaagagcaaattgcggagacgtggccccgtaagtccacgtaagccaagcctggagagcccggctgcccggccatttgcagagctgggcacggcctggcagccagaggacatgttgatgccgggaccccggagtcagcccttcttcccaccattcctgagcttttccaggactatgttgagtgaaacgtccatggactctcagagcccctgggggatcgggagtctgtctctggtcccacaacaagctgtctttgtgcaaaggccaggacggagctggaggtgccactgtcaagcccacctcggtcacccttcacccaccccagacaagggcagggagagatggtgtccatgcaaagtgtggcttgcttctctcagtggcggtcttcccaggacttggaaatcatctctacaatttcttctcttccatcagtaaattacaataatagaagggttctacacagtgcctttgtgggataaggaaaaactaccgccagaaattagtcattattctctggaaggacagggtaatgaagggtttcagatgcgtgttctaatggaaaacaaatggaaagatgggttaaatattgactcagctccagaggaacttcgaaggcttggggagttcatctggggacatgagcatgccagtacaggcccgggatccatgagggtcctgtgtgccccccacactcttctccagccccccgggattcacaagagtcctgcgtgccccccacactcttccccaaccaccctgggatccacgagaatccttcatgcaccccacactcttccccagccccccaggatccacgagggccctgcatgcatcccacactcttccccacctccccccgccgggatccacaagggttctgcgtgcaccccacattcttccccagccccctagaatccatgagggtcctgtgtgtacccccacattcttccccagccccctagaatccacgagggtcctgtgtgcaccccacactcttatccagccctcctgaattcatgaaatcccctggggcactactgacctgccctgctgggctcagagggtgtggcaggcaccgtggccggctcttttgtggttgaggcacagagtgagatgtcttgttagtgagcaggaggcagaccccaccccaggggctccccgagcaaggggaccatgactgggaagtgcaggcagggctggcagtgccaggtgtggcagcgcccctggctgagatgtgtttccagagtctccccggccggttttcaaccccaccctcctttctcctccaagagatcctctctgctgcagccaccatggccttggaggccaaaagcttgttcctaagcagctggacagccctgggggtgaggggagcgtgtctttcccaagagtccccgcaaaagtcccaaggcaggttctcgtgggtctcactgccctgcccctgcccccatacccctccccggggcagagggtgacagcctgtggcacacaaccgggggacaccctccatcttcatgcgttccgcgctgtctgggatggtgggcggcgcgtgtgcgttcgccatggagtaagacggggctccaggaagtgggcgttcccaccgaggccttcggcccgggctgcgtatgtgaccctaaggctggtgagttccgatggtgggagaaggccctgctgggtgacccgcagacccgtaccacagacgttttccacaaagaaatcaacgttggtttatttcaagttccccagaaagtggaaccaaaatcagggttccctccaaaaaaaaacaaggtccacctgaaatgacgggagggccgaggatttttgcccagtttccagcgaggcctgaggcccacggaggtgactaggggccccccatgtggagggagctggggcctggcttcgcagccctcactccgtccacccaagcttcgccactttcgtctgctgcgttgggcttcccgatgggatttcactggaagaaatgacttctcaaaaaatctttttattttgagataattgtagagtcacatgcagttgtaggaaataagacagacagatcctgtaagcccttcagccagcctcccccaagggtgatatcttgcagaaccgcagtgcaggtcacagccaggaaactgaccttcgtaccggccacagcccctactaggatcccacccgtttgacctgcattcattggtgtgtctgtgtgtgtgtgtgtctctgtgtgcatctgtgtgtgtgtcagtgtgtgtctgtctgtgtgtctctgtgtctgtgtgtgtctctgtgtgtctctgtgtctgagtgtgtgtgtctctgtgtgtctctgtgtctgtgtctgcatctgtgtgtgtgtctgtgtctgtgtgtctctgtgtgtgtgtctgtatatgtctctgtgtgtgtctctgtgtctgtgtctctgtttctgtgtgtctgtgtctgggtgtctgcatctgtgtgtgtgtctgtgtctgtgtgtctctgtgtgtctgtgtgtgtctctgtgtgtgtctctgtgtctatatgtgtgtctgtgtctctgtgtctgtgtgtctgtgtctgtgtgtctgcgtctgtgtgtctgtgtctatgtgtgtctgtgtctgtgtgtgtgtctctgtgtctgtatgtgtgtctgtgtctgtctgtgtctgtatctgcgtatgtgtctctctgtgcgtgtctctgtgtctgtatgtgtatctgtgtctctgtgtctgtgtgtctgcgtctgtgtgtgtgtctgtgtctatgtgtgtctctgtgtctgtatctgtgtgtgtctctgtgtctgtgtctctgtgtctgtatgtgtgtgtctgtgtctgtgtatctgtgtctgtgtgtctgcgtctgtgtgtgtgtctgtgtctgcatgtgtgtctgtctgtgtgcctcccatcaaccctaacctgtggcaaccacgactctattttcatctgtagtgttgtcattccaaggatactatagaaatggaatcacagccgtgtgttcccttttgggattggctgttttcctgcagcatcgttctctggatgtacagccaggtcgtatccatagctcgttcctttctgtggcgtagaattccgtggcctgggtgtaccgcggcttatgagccatccccaactgatggacgctgggcagtttcaactctgggccatgatgaactgagctgctctgagcacccattcctgcatggggtctcgtgtgaacataagtttccatttctctagaatgaatgcccgagaatgcaattgtggggtcatctcgggagcaggcgtttgttttgtggggaacttccatgttctctgccagaggggctgccccatcgcacactcatcccgccctcctgagagtcccggattctcggcatcctcaccagcatctgacgttgtcatcactttcaacgttagccattctaagaggtgcatggtggcccctcgtggttttaatgtgttttccctctggcaaatggtgctgagtgtcttttcctgtgtttattggcatctgcgtgtcctcttcaaggaaacgactcttcatggctttcgtccatttcctactacgttattcttttactgttgagttttcggaattctttacgtattctagatacaagtcctttgtcggatatgtggtttgcaaatatttctcccactcagtaacttgtcttccatcctccccccagggtctttgcgagcgaaagtgtttaatttggaggaagtccagtttatccatgcttcctcttacggagcaggcttcagcatcaagtctgagagctcttcatcaagccctaggttctgaaaatgctcttctctgggttttctaacagttgtttaggtttgtagtttacgttaggtccatgattcattttgagttaatttttatataacatgtgagatgtagatccaggtgtattttttgctcatctccatattttccatgactgccccagcgccatacattgaaaggctgtcctccctccggtgaattgctttgacatctttgcaggacatccattgggcacatttgtgtgggtctgttcctaggtttattggtctgtgtgtctcctgccaacactgcaggatgaccgtagcctcacggccagcttcgctgccgggtggagggatggcttcgtggacagtgtgaggtggtcatgccctggccttcacctgtgtccctccaccagggtgggaacatgcacacagcactgcccgtactcagccccctcctcagcaggcaggggttctgccatgctgtccacggcactgccgcgtgaccacagcatggccctggggtggccccaggcaagctccttcccactgcttcacacatcttcagtaaaagaacaaggacagtgcctgcctcatgggcggggaaggtcaggggcaggcgtctatgtggctcccggcagtgacgctgtcattgacagtgtccttattatctgcagctgtaactccttcatattaacagcaacttaataatacattctggctcaaaatatcagttcattttcctgactccaccaaggtaattctgtcaactcaaacctctcttaataaatacaagacaactttgaaaaccacctatgttccagattcctcagagcaccgaggtccacggggtccttgcctggtcaccctgctggtctgcctggcaatccctgtcttccctgagggctgagctacacctcggatatgcatatttgtgaatgatcacaaattccaaatcagccatgtctgaacgatgcagttttctggcctgggatgggccaaccatggccatgcctgaggtctggttcccagacgctggcctgccaggaggacttgggtgcaggtgatttatgaaggacctgcctgctcccaggagatgtctgggagggaggaggaggtgcaggatgccctgacaagcagaaacagcacctcagaagggccccaatgcaaggcaaggttgctgggttctgtgcagggccccagcaggttctcaggaggggaagaggcatcactgaaaatgacagtgaccactgaaggcgtctgtccaggtggcatccaggcccctgcagggttggctacaagccacagctggtttccccctcccgtctagagtaatggcccacaggctgtgtttcccaagggctcctcctgcaggatcctggcatttatatctgcaggaggactctgagacccatggagacctgtgctgagaaacagccacccttgtccccagggcagagaagtacccgggggaccctctggctgtctgcctgcagatcagcatgcagccccccagggtgcctttgggtctaaaaaggtgtgttctattcctttgaactggaccttttgagaagagcaagcaacagatgaaaaatagctgtggccaccaccctgacctgaagctcacgcacccgcacctgcctcagctgtccactctgcctagtcccaagaaccgcactggacgtgggctccgctggtctccaccgacgatccctgcttctctgcacccaggggcagggccagcaatgaggcctagtgaggttccacgtgggaaggacacaccttccgctgaagatgcgatcatgcggtcatcacagaaatgcggccggcggcattcatccactcggccaggtgccaggcaccactcttaagttctccatacaaatcagctcactaaatgccacgacagccccaggaaacggctagttttatttcccccgcatacaacatgaggaagtgaaggcaccgttctgtaacagtaaagacccacagcagctgggagggaaaggcaagacttagaggccaatggatggtctcctgaacgcccctgctaaccactctgcaaaccgcctccccttccccgcctgtgcgttaggaatgcctttggctgaaagtcacagaaaacccaaccacagagaacccaaccacagaaaacccaaccacagcagcttgaacaagtggaggctggggtgagagctcaaggcgtcgggccgaggcctgtgtggtggtcaccccgcttctcagttctcaccacgttgtcacgaggtggctgcggcgcccccaagcgtcacgtacaccatcaggcaggagggaggagggggcaatgtgtagcatgggcagtttcctgtaggaagaagtcccaggtggctgtgttgtcctgtgggtaaggtgggcatcttagctgggtgctgcggagggcaccaggtgggaacgcaggaaccccaccctccagaagcgcactgtcccgttgagaaacccagagatacatccgctcctcaaggtgcaggcctcacacctggggaaaggcagggaagcaaacgtcccaggccactgtgaacgggaagcgcctttccctgtccccgggccctggcaaaggctgtgccctcagcccagggcgctgtcccccacgctctgcgccagctcctttcctcctgcagctcacagccacttctgcacagatgtcttgccctggcctctcccccaggcagccccctccatgccctgggcgactcccttgacacccggagagtcactcaggtggctgttggtctccaccaccgggttccagttctgagcacagagaccccatctcctccttcacccttgccgtggaggctgcagggagagcccagcctcagcctgaccccgggggcagctctcaagccttgatgacacctcagacgtgtcccagcactagctcctggttctcccaaggtggactcattctgcaagatgggcaggagtccatgaggacctccttggcgggggcggtccttgatggacaggtggggtccacacaggtgcagagggaggcagatgtctgccaggcccactgtgaggccaggcgtctcgtccagggcaggagggcagtggacagccagcctgccatccgtactgcctggtcccctggacccctcgctccccatcactgaccagtgactgttttccaccgctgtcccccgcagcatcagagaacgagctctcagggctcgggaactcacccaggctctcagcatttctcaaagtgcccagggaaagacacctccgtattgatgattttttaactaaaaagggctctaatcgggatgtgctacttcctctaacccctcgtaactgtgtggggcctatattataagttttgaaattaatgtcattttaaaatattaaaaagcagggaaatctgcgtgctgcaaatgaagtcaaagagaccttcatctatacagcaccgagtttttgcttaaacagattattctattagtgggccccgtttatttatttattttctttctttgccggcagaagtccccctgaggttaatgcacagatggcactagatacttgaaagtcgtctgaatattaagaatttaaatctctagcctcagtgatttgaacagaaagccaattatggggctgaattagttttcaaattaaactgcaattgaaggcttgtgaaattaatcctttaaggcgcatggcagcgttggtacatgaattccgagaaagagccgagcctggcagcctccgctgtctccccctttacctgttagcacgatccgtaaggaggtgtccagcatctcccacgtgaaagacgaggctgttcctcacctgcagccggggcgggggatgctgtcccaactcgctgcttccttgatggggaaatactcaggtctgtctgctgggggagaaggaggtggaaagaggcctccagagaaagccctagaaagatggtttccttctcattctcaaagcccacggggcaggagaactcacctgggcaccccaggttagcgcagatgccactgggtgaccgttcctcggcagagggcacaggtgagggactgctggccacatctttcctgcagggagcccagtttcaggatttacagcctctgtggaacggagccctgcagggctcgcacttgagcatggcccagatcctgcgtcactggagaagcgagagggccagtggggacacggggatccaggttcccacttcccagacaccagagccagcactgcttacagcacaggaaggaggccagagggacagagcagctctaggtgcagaggaggagccgaggctcccggaggtgaagcgagggtgcagagccatgaggctgggatggctgctctagtgccaagccccacctggcctccaaagtcacccagggccacagaggctcctgcggatggaaagaggcccccgtctcctcccagccttaccagcatgggtttccagacactgcctgcctcagcttcagcttagcccttgggcgggtggactggagccctgccccacaattcacatccatccagcacttcagaatgtgaccttattcaaaaatagttctttgcagacattttgttaagatgaggccagtagggtgggccctgaatccaatgactgttttccttctaacaagaggacaagacacagggcagggcctaagacggtggaggcagaggctggagtgacgtggccacaagcccaggagcacccaagttggacggtgccccaaccccaggagctggaagggccagggcagggctgctggcgttgagccctgtgtgctggtgctgcctcctggcctctggagctgacggggccagttctgttgcttcaagctccccatctgcggtgctttggcacagcagcccaggagaccagtgcagtcccctttggggagaagcctggggaaccccctggtttcgcccacttccctccccatgcagccagaaaccctgtccatcgaacatcctgccacttggagcctgtggggaacgcagcacatgcccccagaaacacaagaaaacacattgctgggagagggctgtgtgacccaagccacagagaccacgtctgctgatcccaggatcctggagcggccactgtggctcagggactccagacacaaggggccgtggatccagtgaggtcagaggcaccgcagctccctctccaggacacactcactcaactcccagagccaagcccttgccagcgcggacggcgcccatgagaggaccgagggggaggtggccccagcttcccgggcagacccttatgagacaaacccgattatctccacccatcattccctcctgaatccactgacaaaccagccctggtgagttcgctggggcctcccagggcaaggccaagtgcagcagttgtcctgttgcccttgacccctggctgtggtcctctctggggctgcacggggccactctcctgccctgtcacccccccgggtcctggctttctctccagtctgctgtgcagcagagcctccagggctctgtgccacacctggggcattttctgcctaaatccacccctgagtggattcgaggcagcctcgtgaacttcaatctgtgtgcgcccagacctcatgccccgacccctgcctggcctctccctgtgctcccacccctgcccctgccccccaacagctctgccaggtacccctcctgccaccctgcatccctcgctgcatccggcaggaggcagtgagctgacttcctggctagttaatgtaggtgatgaactgacttcctggctgattagtgtaggtgatgagctggcttctggggatggttagtgtagatgatggactgacttcttggaatggtttatgcaggtgataactgacttcctggctggttagtgtagataatgggctggcttcctgaatggttagtatagataatggttggcttcctggctgattagtgtagatgataggttgcttcctggctggtttgtgtatgtaatgggttagtttcctgtactggttagtgtagatgatacctggcatcctgggtggttagtgtatgtaatgggttagttcctgggctagttagtgtagattatagctggcttcctggctggttagtgtagatgataggtcgcttcctggctcattagtgtatgtaatgggttaggttcctagactggttagtgtagatgatacctggcttcctggctggttagtgtagatgatagctgtcttcctggctggtttgtgtatgtaatgggttagtttcctggacaggttagtgtagatgatagctggcttcctgactggttagtgtatgtaatgggttagtttcctgagctagttagtgtagatgatagctggcttcctggctggtttgtgtatataatgggttagtttccttggttagtgtagatgatagctggcttcctggctggttagtgtaggtaatggcttagtttcctgggctgcttactgcaggtgtggtcagaattctatttttatatttgatctggtcattgctcgtgtttatattgaacatcttagcagcacctgggatcatacggtaccctgtcaccaccagcatcctggcactgaggtcatcaagggaccgaagtttcctacctggaggaccctcagttgttctgtagtggccacaccaccccctggcatgggggattttgcccagaggaccctcggtgccaccccctggcatgggggattttgtttatgagcttcagcccctggggtatacacaacataggtctcaatgcttggcacagagggatgttcagtaaatatttgttccaggccctactctgctctcagaaacgatgtcagcttggacagccagggttttccacacctgcgattttttccttaggataaactcctagcagtgaatttgctgagtgggcacattttgaagggttttgtgtatgcacagctaaaccgcctctgagaagctgaggcctccccctccccccggaggccatggaaggggccagctgccctctgtgccatcacgattaggtaccatcattattttaaagtagcttttgcacatttgacatgtggaaaatgtcttcctttcatttctttgatcaataataaagttggttttaaaaagaaggagaagcagcagaaagcccatctgtgttaaagatgtacgatccagaccctttggcaagagggctacaccccagcgttccagcaggtgtgttgggtgtgagacggtcagtgccttctcctcattgtgcctttagatgtttcccggtgagcgtgtgctagttatcatgagtgtgttttatttctgcatccagaaaagaattctcaaaagtgtgtcatttggccttaaaaagcagattcctgaacgtagcaaaaagaaaaaagcgtagatgcctagatggagcatgttttcgcagttggccggaaagcagggagcggtccttgttgccagagagtgggatcctgagccacctcccaaagaggggcctcccaaagaggggccctgccgtcgccctttcccgggaaggagatgatgccgacggctgggggtggttcttaagagcagcgtccatcctcagggagcatccagtgaggaaccagcaggagagagacgggtggaggctgccttccaggtgcccacacacacacagctgtttccagaacactcgctctgggcgcatgcatgtttgactctgagcctgggattttgaagccctgctctcccttcctgaaacactgacaccctggctttgccagtccaggcactgtgtcagaagcaggggacctcccctcaaagagcttatgataggccaggcacggtagctcacacctgtaatcccagcactttgggaggccaaggcaggtggatcacctaagctcaggagttcaagaccagcctgaccaacatggagaaaccccatctctactaaaaacacaaaaattagtcgggcatgttggtgcactcctgtgatctcagctacttgggaggctgaggcaggggaatcagttgaacccaggaggtgaaggctgcagtgaacaaagatcatgccactgccctcctgcctgggcgacagagcaagactccatccaaaaaaaaaaaaaagagagagagagagcttatgataaaattgagcccaagtaaagtgggggattcctgggtgctcatcacattttcctcctccccccaggcccctcctcctgtgccctggaggtggccagcagctctaagtgcaggatttgcctcctgaggcaggaggcgagcagaggagggcaccatggcattggtttaaagccattactgtcttgagttaatgaagagctaatgtgataaaagccactgcaagcttctaatgagcagtcctttccacgggggagtgggtgcgtaaactaaggtggcccacgaggcgcgatgcatctgccaaggtgagctgagttccgatgactccggccatctcagaacgtccaggctcttctctgtgaggaagacattctatttctgcaaaaactccaccacatggaaatggggatattgttgcttgcatcagatgtaaggggtgcaattattcgtaaccaaaaagcaggcagagacttggacccctgatcaatatccgattagtgcttggttaatgagcataaaccgcagaatggatcagtccttcaagtcagacatgtggagtttccacgctggaggactctggggtctgggccagggccaccagctcatcccacggtgggggtgcagagggggttcgtccacgccaggaccccttcccagggcgggcatcctggggccgtctgtgttccgtggtacagagacgcgggaatgctgtagatgggagggaattcagtccaagggaaccctctacagctgtaggcctgagcaggacctctgaggagtcagaggggaggcagcctggctggttcctgccgcagaggcccagcttctaatggggcaggggccaacaaggggtgagaggcacagacagcttggtaggtggggacccggacagctccacagtattcagcatcatagacagtagagggaagggccagcatctcaactcccaaacccacaacaggccataaaccctgctgtcatcagccttaaggcaaaccaggcgattatacctccatgctgggcagatgtcccctccacgctggctgagtgtccctccatgctaagcggtgtcctccatgctgggcggatgtcccctccacactggccgggtgtccctccactctgggcaggtgtccccccacactgggcaggtgtcctcctccctggccagctgggtgctttcctcctgtgctggagctgcctctcctcttgtcacctggtttccccaccatgtattccagaggggagggcgggagacggggagctctgagcacacgtggggaagccccatcccagccgggcacacctggcccccactgagccaagcctccagctgtggcacctgcagctcacaggctgtggtggacacacacaaagcctctagacgtggcaaacgtggcaggctgtggtggacacacacaaagcctctagacgtggcaaacgtggcaagtgccttcaaggagctcaacttattgaatgaaggactggcctttattctgagactaagtctttcctatgattttgatggtaaaacattattttcctttcatgaaacatttgagctagatgtatactttaaggtcttcccttggtagaactagaagttggcaaccctatattgattcccctgtatttttaaaaaccaatgttgtccctgaaatccaaaaaaagagcatacagcagaggtcagcaaaccaccggccaaacacagctcagcacctgcttctgtgaatggtttgatgggaacacagccgtgcccattgctggacgcatcctctcaggctgcttctgtgcagctttgaggagttggaacagggaatgtgtgcccgcaaagcctgacatacatactgtccagccctttacagaaagtgtctgctggaccctggaggagagcgtggctgctttcagtctgggtctagcagagctcactggacccagccacgttcctcgtctgtgggattcagtttccccatctgtcaaaaaaggaggtggcccagtcagggtcccaaaggtctgtttccagcctcccgctgacttcccattccacacatcccacctggcccctcctcaatgccaaaccctctcacgtccacatcctggcccgccttttccccaggtccccaagcctccaagggggcttagtcctcctccctacatgaaatcacacagcagcaggccccttccgccgagggactgcttggaggaggcagcttcgattggtgggggaggacctcctgcctggccttcggggaccgaggagtccttcaggagagatcagctggaaatgccactccacattccatcctcagtggggagagctgggccccagtgggcagggagttcccatgatgtcgtgaggttatctgagtcctgtggaggcggaggagggggacctctgtggtgggaggctcccagccgttctgctaatgtgatttctcagtgatatggtggatcagggcaggcactcaaagggagtacgcgggtctctgcctcacagtggatcagtaaccctgaggtgctgggagtcctgggctgactcgctgtccctccacctcccccagccagtagggctgagtggagaagagctccaagcccagatcctggaccccagccctgctccaccgctgtccgatgcgtgactggcccgagttcctgcacgtgggcagcaggccatccgtgagatttctctgagacatgacaaacccatgcacaaaagaccctcgggccagctgggcacagggtggggacccaggaatggcggtaggggctggggcagggtgaggaagaggccaaggccgtcagaagggctccgcatccccatccagcccgagagaccgtcattctcagaaaccaggctggctgtgctgctttcagtgagtacaacagacagtgcccgatcccttcttccctcactggtcagggctttgcttctctccctccaccttctgcatgtccctgccatcatcctgccacccccaccatcaagctactgggcccctttctgcgacaggcatgtggatcctcacaggtttcacagacgaaaatgccgggggccacgggtggaggggaacagtgagtgcttcgggaagctggagtggcttctccctttgactttctgaaccagatgagccaaatgcggtcaccaccgacccccatgactttcccagctctgccctttcgtagagatgggtggtttcaaatagtgcctgatgcgccaacattggcttcacttgctcggggattcctggcttgatgaaggctgaacgttagtaacaccgccctggtcagacccaccatctgctttgcaaatgaaattctgcaggtgtttgttctggtgtttcggtaagcagctttaaaaccctcacgaggcaaagttatttttgtttatacaagtcatattccttagacgcaccagtgtatttatcctttatataaacattacgtatatgtatatttataggatgtgtgtgtgtgtgtgtgtgtgtgtgtacatatcagagagagagacagagacagagctcctcatatctttctgcatttccaaggtgccctctagaatcattttccttctgcctgaaaacacccttagtatttcctctagtgtgggtctccaggtggtaattttttgttttatcatttatcacatttagtgtctatttttcacttttattttagaaagtttttttcactgaataatgaatgccaggctcctcgtgagttccttgtattccattgttttccagcttccatcgttcctgttgagaagtcagcttgaagtcttctcattgccacattgaaagttttgtgctcttttaaaaaggaggctgtgtgtgatgttatccctctccacgaatgatttctttttgctgctaagtaggggacgctaacaatcacagagaacctcagcctaagttactgcagttagctctgcgcgtgtgttaggactgtttcttcccagttcaccctcactcctagggtgctgcacttcagggttttcctcttaggaaaatgcagaggaaagccagcacagagggagggggatgtctctttagaggggagtatggttgggaccaggcttgttgtgctctaaagtggtggggacatcgtgatgggggcaaggatcatcggggtggggtccctagttccagaggctgatggtcgccaggccacggcccctcccacccgtttgcttactgcataaatctgtttgattgaactataattcacgtgccatacagcttgctctttgaagtgctcctgcctccgcttgtttttctgtgttttcatgaaacgtgtctgctttgagaattttgcattcagtagaagctgaaagctgaagcaaactcctagtcagacacacccagggttcccctgcatcccacctgggcttgtcctgcctgggtggaaggccagagtggcggtcttctctgcagggctgcagagggagggcgaggtgggggaggggcgagggggaaggctccctgcctgctctggggtcctggaaataagcagtagcttcgggctcctcgcagaccctgcctcctgagcatgaggccgccccgcaccctgggcttctggcacagtccagcaaatgtccaacagggcatctgtgtgccaggtcacagggacagcatggacccagccccgcccttgtggtggctgtaatcccacagaggacatagacaataagtagacacacagctgtttcaatgcaggtgagatgaggatgcacagggccccatgactcagtccagagggccaggacggggctttggggatgaggaggagttggccaggtggaggagagggaagaacgttccagatgcagaacagattgtgcaagatcccaaggctggtgtggcgagagtccttcatctcatgcacacgggaacgagcacctcgggtctctctgagactgccaccccgcacctggcccgccgcatgaccccagccccgtcagccaggggaggcactgcacaggtagaggttgcaccatccccagggcccagcagggcaccagcagctctcctctgtgcatgaacgctgcagggccgggcacccgagcttccagagttctggggcatctcaggcagccagcagggcaagctgagcacacacgtgtgcagagccagggcaggaacaccggaaggtggcgggcagagtccagccccaggacttccaggtgagagagcccgccgtgccagcatcaggagacagcagtcaggagctcacagagcggggcctccaccgggtacagcgctagcacagagttggtgctcagtaggcagggactaaagcccccacccaccactgctcccagcagagcttggtcctcagacctggagatgtcctgaggccacagggtggggcgtgctgatgcaggccctccccagggcaggaaaggctgcacagccaaagaaaagccaagtgccattctcagaaagtggggaatgtgccagagtgcactatagacctcaaccccaatgtgtgcatggggaaactgaggcaccaagctgagagagcacatgggcagctcaccgagcccctctgaaatgccagcggcccccagtcccagggcgcccccagatgtgctccatctgacggagtcctataggcacagcctccctgctcagagtcccttctaggtttgttttccactgtgtcctctgcagtgtttattatacagcttctgtgtgtccagacctataccaggccctgcttcagtgcctgagtcccttcctttaagcccaaccacactgggctccctgcaggagtggaagcaccttggacgcactgtcggggcctcaggccacccggctccaggcctgctctgctgccccaggctctggaagcttagagaagttcttcctcctccgaggcctggtctttccccagccaaaaaaggaagaggtcagagcagatgacctcaaaggaacctcaagctctagaagaaatccttctatgattctataaggtggggtggaggcggcaggtgcactaacaccacctctgaacacgccgagaggaagggggttccgctacgccagactcacggagagctctgtggtcggggggctctgcccaggtgtgtgcgggggtggcagcctgtgtggcaggccatccccatctgagctgctgtctccgttccaggcacctacgtgatgaccgtcacggccaacgatgctgacgacagcaccacggccaacgggatggtgcggtaccggatcgtgacccagaccccacagagcccgtcccagaatatgttcaccatcaacagcgagactggagatatcgtcacagtggcggctggcctggaccgagaggtgaggcggggtggggtctgcgtgcaggcgggtgagctcctggtccccgcaggacacccacaggaccctcggggagcctctccagtggcgccgtcggggagtgatcgacagtctccccagtggcactctcttgccatgggagagactcagcaaaggaggctctggagcactcagcaccggctgctatgagcgagtccttgtgagatttccagaacaggcccagctggtgcgtgtggctatgggcggaggcctcagaaaagcagggaccacccgctggggtctcggggtctagccgcagctgcactcggggtctggggtgctctgacagcccctctcaggacctgaacacacacgcctgccttgaaacccaccccttctgggcctggcacctccaaggagacccaccccacccaggctgcggcggcctggctgtgacgaagggggcatggagaagcagtgcttttcacacagcctgaaaccatcacagccaaatgaatgggctgctggttggtgctgggttccatgcgctcccacctcctgcactgtcctgcggtcctacgaggcttttgtgacagaggcctccctccaccccttcatctcaagtgcccgccccactcagagacagaccccagagggaggccctgggcggtgggtgaggtcgggggcctgcctctgctctgaagcttgtcaagtgcaggcgcatctccagcactgggctgtgcgttcccagaagattcaccacccgcccctggggctgaaagcgccccaccagcagcaccttgagtccccaggtgcccaggacagggcatcgcctgccttccccatctccaggtctcgctgtctggtctcctgtttgcactgtgcccacagaggccagtgtcattccagacgtaatttaccctctgaggcatttggctcccaggagccggtagagccacctcgctgggctcacagccagtgcagccctgcccgcgggaggcttgtttccagaggccacagcgccactttctggcagctcctcggtcttgctggcctcaacccttctgctccaagttggcggcttctgagtgcgtcacggccctcgagctctgggtgtgcggggaccccactgcaagctggggctgccaacctgtcaccggggcttgctggtgtcgcttttggggccgggactggcaaggaagtggcaggtcctccttccaggtttggggctgtgggaccccccggggcctccagtttctgcctcttctccaaaaaccaagactcacctgcagtgctgtcttcatccccgcctttcaaatcaaccaaagccaagctgcagcctggaaaatcccacccgtctctgtccctgggaagagcacaaaggggatttcctggaaattcctaaatcgtaagggggtggtgcccagggtaacacatgggggcagagaggccagttggggggtaacccttggcagccatgcggcttgcggggaaggcgaggtggccgccgggttcagcacgggctcaggactcagacccgcacagcagaggacgttgtcagccccagccgtggcacctttcatctgagagacagaaggatgatgacagccttggactccaaggatcagagatggagtcgtgtggcaggcagcgtgagggctggcacggatggcacaggcgaggacttttgatgcaggatttacataaacgttcttagagtgatgttggccagaatgcctggggctccgagtgagctgtggtcagtcccagcaccttcacctcaggactgcaggatccgctgaggccccaccgccctccagtggccatgaaccagcgcccgctccgctcagacaaggctttgcagatgagctgcacctggccctggtcccgtcattcagctagggagatgatcccatgggcacatggccgagtcaggagtgctgttagtgaggcccatacagatgtacaggaaccagataccgtcccccatctcctctgtagcctggggtcccccgcctgccctggggagagagggcagcccctgtttgcgctcccccaacacacacacacacacacacctgtgagcagctcgtttccacaggctggcacctctctgggacgtttgcacagcttttggcagagcaggtggtctgactggagcgtgtgcgtgcaagcccctgtccacacactcccacacacgtgatgctccagaggtacagatgggatggcacggctgccggctgtgtccaaggagaggacaggacagccgagcaagggtcaggcctgtgagcgccggcacctctgggatggccccttgcaggggcagggtcaggggttacctagagcccacagactgccccacctgcgtgccatcagctcctggtgtgtgacggggaaagcacaggggccaaaagggcagtggggatgcttagggagatccgatggggcctcgccgtccagtcccagtgcaggggcatggctggctgcatgctggccgcaggaaaccgttctctccctactctatatcggccgcgagagagcaacgtccaattggagaggcagctggttctactgagcgaccggagaactgggaaggggaaggtgtgggagtttcacgggattgggtgcctgcaggggaggcatgcaggcgtgcggagggttctagacgtgcagacgcagtccatgaacacatctcttcttacatctggtgtacaacatggcagcagtcttcccttagggccggggttttcgtattataatgataagctggggatctaaaggggaccataggccacctgctctggcctgcactggtttcgtgtcggtccgccctccctctggtttccagtggggttgagggggtccctgtggcttcaggaccatctggtctccttcagcacgaatgtctatagataaagggactaaagacaaacagctaaagctttcccactgccgggtggagggctgggaggtctggggtactttgtagtttatattgtaggaaagaatatgtgatattttccaggctgaaaatatatctaggcaacatctgtggacccctcttcatagctgaaaatctcacaaggccccggcagttagtatgggtgcaggctctgaccttgggagggatcaagagcgccacggagcccacgaccccctggggttcccccagctggcctggtgcaccctacgggagggacaccccctggcctccctgggccaggcattcctgtgggcatgtcaaggcccgtgatagggacagtgcccagcctcctgggctcagctccccctgcccctacagatcatggcagctcggccaagggagggctagcagtcccagccacccagagatctccccacccactggccaggccccagtgaggctgacccggcagctggaccccctgcccaggccagacaccgaggcaaggcggggccagcctgctccccaaggcccacagcagacacagagcggtacccaccccccaccccccaccccccgctgtcggcagcttcagcgtggcctgcaaaatgttccacataaaatgctcatttaaaagccattagaggtgtggttgacagacggagatttatgaagattgaggaacatgaggagacgctggtgttgcgggcgctggcgttctccgctgtgtgtgcctggggatgtgaacagcccggcttctatccgacgggaggccccgtctggtgcatctcaggcgtggtgtgctggagagggcggtcccgtgtcttcctcttccagggctcgtcgggaacataggttgtgtggttattttccttgatgatccttcagctgctaacattcgattccaggaagatcagtttctgtcttgtgcgtgtgaaacaagctggttgatgcagtgaaacctgggacccccatgtggaccagcatcgtggggggacagcagagccatggttcaggggctcaggggacggtcatggggctggactttggggccatgacccccggaacgtccctggggtccattgtgtgacaacgcgtctttggctgggaggacccccaggcaggggatgaggtgtaacccaaatgaggcccggccccaagcagactgtgacagggtcatcaccaggaaccacgggggccccagagggaggacttcgtggacacagacgggcgtggtcatcccagagaggacaacaggccctggcctgcgtgagtggccaggagctgagctgtaggcctggggcagctggggcaaagctaaggccccatcgtggccatggcgtcctcatttccagccacgatcaaaacaagaccttcatgggcagcacgtgcccggcagcaggacccctcccaccttctgttccccctgcccctttcaaaccgagcccaagcctaggaacatccaggtccctgagctgctccctccccaggttcaatgcagcccccggctggaaggtggctgtgggtcttgaatctgagacagacccaggcgtggcctgcagctggctccatttgggtacagagacagtgttgggcgccctcagggcttctcgtgagcagaaccaaaggtgttcatgtcatttccacgttattttccttgtgcaaacaagtctgtttccccttctaaaggcaccagctcgagggcttccattagggaagctgcctccagcacgcagcagccatgtcccagggcccccgcctggccccaggtcttcagcagcccctcccagtggggacattgaggcgggcttccctccccagacatggagaggtcatccccttgggccagtctctgcagcagtttatggcatagtctcaaagtcgtaggtgacctctgaatttgtgaccccttggccggaggagacgcagggccctggcattggccaccccactctgcccgctcagccattccaggtcctgtctcccgccttgcacacagtctctcccactttttcgcctttgcctcggaatagaagtcctggaagctgccaaagactcggcgggggtgtgccgaggccagggcgcccctcgccagggctctgctttcagtgtgggtctgtgcttaatgttcagagctgccctgctcttccttcgcccacctcctggggaaattgaatgatggtttataattataaccgcttctgcagcagaggatgcacgttgtcggattttcagcagcaaacaataaaacaacaacaggttttaagacaacggctccaggaccaccgttgccaggcattagtaaacccacgcaggcggccactgacagcagtgtagacgccaagcgagcaccagttcagctcccccgggacccggccttcacccagcagagccactgcccccctgggcccaggcctgctgagcccgagaagctgatttctgtctggcttggcgtatcagagaagagcacacatcgggaccatttctccaccagcccagcttgccttgcatcggccggacagctcagccacttctgaaaaggacacatcggtagttcctttttctcttcctccccctttaaaaagattcatctcccctgcccttgggcaacaagcagagtcttcgggggaagcaccagagatacttctcagcaccagcctccatctgacagagtgagtcatctttaggaagaagaaaatccacaaacatcattgccgccgtgtctaattaggcagagctatgtaaattgagcgcttctacttgattaagatgtcaggagaggcttcgataagacctgagcggttcaagtgtctctcgtgtaccagccgaagatgccccacttgctaatcctattcatctggcgttgtttcctaattagaatatttatggcctaatgaggaggtgaacgtgccgcccgagccccgtcctgaaggtgagagtgggctctgcagacgcaggcgctgttccgattgttgggcagtgaaattagcaccgggccagcattgttctcagcgtcccttccaggctgctcccgaggatgttgattttgttattagaaactgaatccggccttccggtcctatcacaagaggactatcacctggtcacctccatcagcttgaaatttcttcccaaacaaggggggccgaattcgtgatctcctggtctgaaaggattctggggaaagcaaaacccacacctccccgaacgtcttcaagaccctctgcccgcccggtgctgtcatccaatggatggagagtgataacgtggctctgttctactgctcaggatatcgttctcaccaccatcgactttagttaatgtattcacatgattcaaattccagtagaaagtgttcgtcggtgaccagaatgtcccctttccctctgagagcggcgtggctttctgaaggcatttctcccagacagcgagcctctcgtaagccccacccagaggcatctgcctggggagggcagtagcctggggcaggcggggttcagcgtttcccgctggctgggttttgaatcactgtcatggaaccctgttttgaagacaccgaatatggctatgttgtcttgcagaaaaaaaaatattagcaattgagacaaatctgctgctgacccacctcgggccggatttgtgcccctgaagtcttcttgatctcccctccgccccctcccaaaagaagagaagagagggaaggacagcggtgagaaggtggacccagccaaggagccgtcatcttggggcttccacctccctccgaaacagaggcctcggctcccgagtcccatggcgtcccccaagtgtggggcactgagcagccccaagaggaccccaggccagcaggtcacccccaggacgcagaggccgccacccctggccttgggggtgagggtcggatgcagagagagggtcgaggtttgggcgcggtccccacacaggatgaggttcccaggcacgctgggcagtgcgtgctctgaaggttgggccacacgtgagctggcgcccaccactgctgtctcaaggtttccaaaggccagagctggcaggtgtggccacccagcaaggtgagaagaggtgccagtgagttagagtgagggccccccaggccccaggagggcaataacagcggtgctaatggtgacctggtttcatgggggaccctggatggcagaggagggggctgagccacaggatggcccaggtgacccccaaccaactcaggccacttcctgccaagaggtccctccctggtgaggaagctgagtgccccttacacccaccagcatgtagggttcctgcggccacagggcatgagtgtcagccatgctgagcggggtcacagcagagcagggtcaggacagctcctccatccacggacgccactggaggatgagcctgcagcccctgagcagttctcccaccgtggggccacgtgcacacggggtgatctccgtgcctcaggaagctgcgctgcgaagggaggggagacgatggccatggagtctgagaggaggctccattccagcggtggcatttcgtaaccaaagtgccaagtgtggtcccgggcagggctgcaggagagagaagccgtggctgcggaagaaataaaccatttcatggtgcagctccccagcgagccgctcccgtgagccggccacaacatgaaccgtggccaggattacggccccacctggcagcagcggccaagactcccgcctcagagcctccagtggtcaattagtcgaccgctgttcatctgcctttggaactgggcccaggcggctggggtcgtagctggagcagaggccaacgtctccatctgagaagggccagcgccaggcagagggcaggaagaggagggggcggcacgtgggggactgcaggtggggaggagtgagaacccgtcacagccggaagtccaggtcccctgggggccactggcccagccacagacctggcccaatcagcatctggactgggtttaatcgtggtccccagaaaagctacatccacaccctgatccctggcagcgtgaccttatctggaaaaggggcctttgcaggtgtaaagatctggagataaaatcgtctgcattggggtggaccctaaatccttacagaggcagagggagacacaggggagaaggctgcatggagaccgaggcagagaccagacgataaggctacaagccaagggtgcctggagccgccaggaggtggaagaggcaggacaggtcctccctcaagcccctggatggagccggaccctgcccgcgcctccacctcgaacctctggccttccggactgctgtctttaagccacctcatttgaccagaccctgacaggaagcagccagacccagtcccttttgccgagaagcctgtgtctggctttgtgctgaggctttattggcacacagcgtggctgaccatttgcacgtgggcggtgccacgctccaggatggcaccatgacgtgaaagccaggttacttaggaggaaggagcggggatttcatctgtgccctcagcggcacggcccctttggtggtcagatccagggtctcaaacccagagacaggtcccaccacagaggtgcagtttgtattaatcttgttttaactcggtcaacatcgaaacgagagatttctattcaaatcccgccttctggattctctcaagattcaggacctctggtcacggggcctgctttcctgcaaggcaccaggaggcctgggctaagggagtgaccacccagggctctgaagcccctggcccggggggtgcagcccctccctcccggggttccgacgccaggcccaggatgctccctgagtcactgtgtgcggctgttttccctgccgtagagaaatacttcctctaggtctatcaaaagtgagaaaatgaaagacaaaaaggcccgtgcgtctcaggagaatgggagagggaacgtgtctgcggaagggctggatattcccgagggtttcccggcaccccaggtggcatgggccgccccagccccccgccccttcctatcttctgagaagtcacccggccggccccgcaggtgcctttccttctcttttatgtccactgtctcccccacacccgacggaagccactcagaccacggagcacatgccccagcctctgcgcatctcctgctctgtccacgcccagaagcccagtgatcctgttcaaacaccaatctgagctcttgtcttttcaaaccccaccacggtttcctgtctcacccagaaatgagaaatgaacccggccccattcccccggcaccccaagcccaccccgcctgccccagggccttctcgctggctgctccccccgcctacagcattcctcccgagacctccacagctcgacagccacatgtctgcctggcaaacagccctgcctgccgcccggtttaatgtagtgcactgagtgccctgtccctctctcctgctgtgttttctacacggcctctgtccccagctgatatgatactctttgctatttgctgtcggtctcctcccctagagccatgcttccaacctagggcgacgtctttcttgggacactgggcaagtggtggtatctgtggttgtcacagctcggtggggggcaccaccagcattgcatgggtggaggccaggaatgctcagcacccctcagtgcccaggacaccccacagcagagaacgacccagccccagggctgacagtgcccaatttgggaaaagcttccccagagcatcagccacaggagggcaagggctccaagagccactggaacttatggctcagaaaccccaggccactggagagctcaggcacgtggccctccacagtcgggtgtgactgcccggcccctggagagggaagtgttctcctctatgacccaggggtggggggccaagagaggccccagggaggagcccccagcgcctgctggactgacgggacctcccctgcctgcctccatcttgttcctcccagacatctagactcttctaatcaccagcagtcattcctggcagctcctcttccctctgtgcccagcagagaatgcgagagacagagaaacagacggacagacagagagagggggaagcaagagggtcccagcatccccaccccccaacccccgtgtggtgggttttgtggatttaggaagcagagactttctttgtggcctcccctgcccccaacagcaggccgagggaggaatcgctgcctggaactgggactcgctgcctggaactgggaaatgctggtgttttctctgggtttgatccagctcagcacagcagaaagcaaacctggctgtagagtgagaggggagggtctgctggagttgggcttgtggggcgcagtgcagaggctctgggccaccagtgaacacggccagagctagggacaccggaggccccaaggggtcataaaacccacaagagctgaggcagctgcacgtcactgtcctggctgtgcaaagggcagctgagcagaaggttgagtgagacacgcttccttccacgcagcaacccggacagctaaggggccgggtccctggttttcagcccctcatcctgcaggaggcaaagtctgcggagccagaagtggtgagggagagacagtggcagtggacggtccacgagtttaaaggggtgagcagggtgttcaggagggagggagggaagatggcaccccttggggctccccgtgtggccgtgcccctgagcaggggtgatctctcggtgacagcctgggggcacccagcgaggggctccatgctcagcccctccccaccccaggcgagggaacctcagaaaggagccctccgcacccccggacctgcatttgaaggctgaagggctgagcacctcacctcgggggcggctgctgctagttcctgggtgcccgggaaattcacctggacaggtggaatgtgccacccaggcagcacctcctcccagaacagcagcagccccgaagggctgaggggtttggaggaaggagagagccctggggtgggggcggggaaggcttcctggagagggactcagcctgtagcgggaggtgcggggttgggacaccggctggagccccgggctaagagtaggcatagggtaggccccaggtcccttcagcctggagagtcccttctctgatagcctaagggtcagtctgcaggcccagcacagaatctggccagaacgactgccagccagaggcagcccccaccccaccagctcggtgatccatgctagagtggacatagggtgctgagtccctcgggcccctgcaaggcagcggggactgaagtcgacacatagcacgttcgtgcctgtgccttgagagggagctcacacgccaccaaacacaccctttaactgtacgcttcagcggggttcagtggtcacaaggttgtgcaaccatcaccttgacttagctccaggactcttccatcaccccagaaccatcccatttctcctcgactcccttacccccagctcccccagcccctggcagccccaaatcttctttctgcttctacggatttgcctattctggacatttcctgtaagtgggctccttccatgcatggcgtttcgtgtctggtgtctctcaccgagcgtcaccgtggtagttcgtgtctgcgtttcatgcctcttaatggctgaataatattccgctgcatggggcaaccacgttctctttgtccattcatcgctcaatggacccttggctgttcggcccttttggctgctgttaatggcgctgctttgaacgagggcgtgtaagtgtttgtcagaacccctggtttgagctcttttggatacatacccaggagcggagctgccaggccccgtggtgactcttgacttgtgaggacccgccagcctgttttccgtggtgcctgcactccctcctcccacagcatctaatcttcatgccggagtcacattctcaggctccggacagaccccaggtgctgtgcagcctgaggatgagacggagagcaggacccagatctctgtctgctccatctcgcagcttccaaggggatggaggttccagcagtgacagcagggaaggcccttggggagtgtgtggtccaggaggaagcagtgggaacagcgctgacctgagaggagctggagaagctcccagagcagcagccgccgtcgtgctgggactggctctggctcacccagaaggaagggatgcagggcatctgcaagcctgggctacagggccttgggactccttttatacccccatatgtaccgcctctaggtgcagagagcccagagcaggtgggggaggcgtgcttgcagcctggcagatgagaccatccctagatggtggctggggtgggggcagcatccaggagaacttcaggatctgagttccaggcgtggctcctgccagggtgcctcactggctgtgcagccggccagccgatgctgggtatggccagggcacgctcgactcaggaagctttgatgcctttctagggcaggctggccgcctgcattattgatggctgttctgcaaaatttacatgctgagctatggggaggtgagcaaaaaccccagggatggcccactgtggttttcttccctcctcttgaacttgaaaatggccaaatcactttttaatgaattctctgcacctggcagaagcaggaagggtaggggccccagcccaggacaggagcatgcatccagcagggcacacccagctgtgcaggactcccgctgcccgcccagacacctccatcgagggttgacgtggggagcagaggctgcacatgtcagctatggagagaggacgctgggacgctggtccagagctgagtcctgggtcatctgtttgtcctatgagggctgggagacacttgctggcctccagagcactcaccagcccctgacctcagggaagtcccaggccttcatcttctgcaaagtgggagggcgccgtgcccctgtgccacacgggcccttggaggactgcacacagcgaggcctgttggggcaccgggaggaggtgccagacacttctgagaacagggccctgccctgtggttaacgtggggctccccttgcccgcctcacaggaatgaaatgcacttgagggcaaagggagcagcccaatgtaagccttttagataaatgtgtcgaaacctccagccaagccagcccaggcccgctacatgcagatcagccacgtctgcaaggaggcctgtttgcaggagctcccatgaccgcctcatgagcacatgcctgggtcctgcccacccaccctctcaccccagagaacatcccagaaaagggggagatgggcacagtgatgaggtcaggagcctgaccccacctccccagtgctcccaggggagccaggccaaccctgcctggacttcagaagccctgccaacgggaaggccactggctgcttccgggggtcccctgggagagttcttccttcctgcgggtctagcttcctgcccctacccagccaggagacacccctgccctgcctctcgaaatcaagacccagctgccctctagtggcagtcagctgcacacacacacacacaacacgcatgcacatccatgcacatgtgggtttacatgcatacagaggtgcacacatacacgtgtgtatacacgcacacacaggcatgcacactcgtgcacaagcacgcatacacacatgcacacacacaatacactgtacatgtctctgggtttctacgatgcttgatttattttcaatatatagaaaagaatacatttctttcctatacattgaaagcaccacagccaggggtggcttccatgaaccggctctgattggatgactgaagaaatggagacttggagaatgatgtcatgccgcaagtctgtgacagcagtttctctgcaggctgacattcttctccgcttggatccctccctttcctgccggcccgtgtcagtctcctgttttccagtctggtccttctggcggtgccatgctgcgggaggaggcagccacagccaaataaacatgtagctgagagcagcctggggaccctacgctgcaggatgggtggccgaggggggccggtgcaggcaggcagtggggcacctcctgagggggacatcacgcccaggaaagaggctgctgagagccccctgcagcttcaatttccaaatctgtcctgggagggggaagaaaatcggatttgtaaagaacaagagaaacttgggtgagaaatgaagagtgtccacagcgaggctgcctgctgccctgtcagaaaacctgattccgtttcctgggggagcggggactgaagtgagatgcagccacatccctgcagagccgccgccactgccggtacacacagatgggacatggatgaaatgagactccgcaggcaggatcccggcccctcaccaaggtggcatgggtatctgacatttgggttctcattggcaagcctgtccaccgctgctggcaccgtccccagcccatctctgcagcctcctacctagaggcagagccaaccttcaggctccgtccagccgctgcaagggagggccgggtgctcacaggtgaaggagaacacagccagggtggggaagcttccagaggtgggctggctggtctctgccttgatgaacaggagggcacattttctttctgttgggatcctgaggcacagaaaccttggggaagggacctctgctatgggtagtaccatgaagtccaaggcctcaggcccagcgaatgtctggacacacattggtccacagttagaaggcagatcctgaccctgaggttgccaagagcagccagtcaagggtggcgccagctctgctgtttccatgatgtccatcccacattcaggagacccagcgggcatcgggctgatgtcaccatggacatcattggtgctgcctgagtcccatccataacaaaggcctgaagcgcagactgacacagcatcagggaccctgaccggtcccctcgctctgccctggtcagctgtgtagaactggggaggtcatgggactgcctggccctcactggactcagtcttcccctccgtaaatggtaaagaaatatgagctccactgaccacgcagtgtgacaccagtcactgaaatagtgaacaggaacatgcttttttattgttctctccccattgttggctttctcccctccctcacggcctctgcattagcccccaacaatgccctgttctgcaccatgcacctcatacctcctgccccagccctgctgtgcctgcagctcatgctatcactccctcctccctctagtgagcccccaccttccttcctcaaccagctccccttgcacttccgtagaagcctctctcacctccctcagtttccttatctcatggatggatgagaggacctcagcttccttattggttggttgtaatccacctgacataaggagaggtctctttaaagcatggatggatggatggatggatggatggatggatggatggatggatgggtgagtggatggtggatgatggatgatggatgggtgggtggatggtggatgatggatgagggatgggtgggtagatgatgggtgatagatgaatggatgatgcatggatggatggatggatggatggatagatgatggatgagtgagtggatgatggatggatgatggatggatggatgatggatgagtaagtggatggtggatgatggatgatggatgggtagatggatcgatgatgaatgagttagtggatggatggatgatgggtggatagatgatggatggatggatggataggtggatgatggatgggtggatggatcaatgatggatgagtgagtggatagttggatgatggatggatagatgatggatggatggacagacagatggatgatggatggatggatggatgcatggatggattatgcatgatggatgggtgagtggatggtggatggtggatgatggatgggtggatggatggttggatgatggatggatagataatggatggatggatagatggatggtggatgggtgagtgaatggatggatggatagatgatggatgggtagatggatcgatgatggatgagtgagtggatggttggatgatggatggatggatgatgggtggatggataggtggctgatggatgggtggatggatcaatgatggatgagtgagtggatagttggatgatggatggatagatgatggatgcatgggtggatggatggatggatggatggatgcatggatggattatgcatcatggatgggtgagtggatggtggatggtagatgatggatgggtgaatggatggttggatgatggatggatagatgatggatggatagatggatgttggatgggtgagtggatggatggatacatgatggatgcatagatggataatggatgggtaagtagatggtggatgatagaagggtggatggatggatggatagatggatgatggatgggtgagtgaatggatgtatggatagatggataatggatgggtaagcagatggtggatggtagatgggtggatggatggatggatgatggatggatagatgacgggtggatggatggatggataaatggatgatggaagggtgagtggatggatggatgatggatgcatgggtggatgatggatgctggacaggtggatggatggattatgaatggatggatgggtggatgatgcatgatggatgtgcagatgatggatgggtaaatgatggatggatggatgggtaaggggatgggtagacggatgagggagaaaggaagaaggggagcaggtaagggttaacctactgtgagaaaactatcaaagtaggatatagcacccaagtaagtgtaagctatttctggttttttttgtatctccttgactccaagttctattcatcttggtaaatgtcagctctgttagacacgactcattaacttggttccctcaacagacaccgattacctactgtgtgccaggtctgtatctggcactttggacacaaagctggacaagactcagtcctcatggcactctgggtcttccaggagagtccagcctacagcagatgtgggcagggttgtggctgtccgggtcacgctgcacctccagggttaatgagagaagcaaaatcaattccagagactttaggggagctcattttggaaggaagagtggggtctcaccagcggaaggagggagagggacaacacacccgcaagcacagaggggcagggataggaggtgtggggtgcacagtgcagacagggcgccatgtggggcaaatgttggggtaacgagggaggggagaaagccaacagtgggagagaaataatgaaaacctggtttgggctgcacgttcctgttcactgtctcagcaactggtcacggctatgtggtcagcagaacacagtcgtgtcccattttacagagggggctgccaaatacaggaggccaaggttgctgacggctctgcagcctgcaggcccctccctgtcctgctgagcctcacagcctccccctggaaccctctcctgcagggggcctgagccgcccactctccccggccctgcaggagctctgagtgctgcagtcctccccccttctccaggtgactgatctgctgcagggaccacgcaggcatgggccaagaagcagtttcctgcccttccgagaggcccctgacacctgcctccttgagggagatctctcagaacaacagccagggctgcatgatgaggcacatgttggggctggagggcccaggagccagcgccccactgcactgagccctggccccatgtaggctgggcctggtcaccaagccacagtcaccctgttctgggtgggaggccttgtggaacaccccagaccctgattggctgccgtgttcccacctcccgggtccaaccgcacctcccagccctgccctcagttcaccctgtcaccttcaggcagtgtgactgcctcttcctggaagcctcctctggatccccagccctccctccctgagatgcttgtggccttgctctcaggcctgtccaggtggcagtggcttacactgcctgatattggagcccaaggtcagcaaacgtcttctataaagtaccaggtggtccatattttaggttttgtggggcatacagtctctgtgcagatactcagctctgccttgagagtgtgaaagcagccatagataatgtgtcaataaaagagcatagccatgtgtcaataaaactttatttacaataatagtgatgcgcagattcagcccacaggccatcgcttgctgtcatgtataagttggatcctgtgatgcacttaaagcccgttggtgactcacagctgtccacagactgtccagacaccttatggagcacccaggcccctctgtcattcctcagagcttctgttgccaccacaatcattggcaacattaacttgctgtcatggggcacctactctgtgttgggcccacgtttgaccctggagacacagtgggtgatggatgagacagccatggccccccagagctcaggttggcaagggttacagacaatgatcaagggaggacacaataaacgtaaaagtgcaagccaggaatgagtcatggatgaagagcaggctgagctgagagcatgctgggctggagggctgggagagaattccatgggaaagggacatctaggggctggggagcttgattcaagatgaggccacagagggggttagcagccatgacacatggagtgctgtggccatgttgagggtttggatgtatgccagggagcttttgctgcataataaaagatcccaaaacttagcagcctaaaacaaccaccatttatttctatttatttagctcacaattccacaaattggcaatttgggctaggctcagctggaaaacccttccatccttggctgggctcattcatccatctctcatcagctgccagtttggcttggggctggctggtcttagagggaaggaggaaggaatagaaagacagagggatggaaaggtagaaagagggagggagggatggtgtatgggtaggtaagtggatggataaatggatgggtgggtgaatagagggatagatgggtggatgggtgagtagagggatggtggatgggtgggtgggagggtggatggatagatggatgggtgggtgaatagagagatagatggatgggtgagtagagggatgctggatgggtgggtggatggatagatggatgggtgggtgaatagagggatagatggacgagtgggtgaatagagggatggtggttgggtgggtgggtggataaatgaatgggtggctgaatagagggatagatggatgggtgaccacagggatggtggatgggtgggtgggtggatggatagatggatgggtgggtaaatagagggatagatggatgggtgggtgaatagagtgatggtggttgggtgggtgggtggataaatgaatgggtgggtgaatagagggataaatggatggatgggtgaatagagggatggtggatggaggggtgagtggatagataaatggatgggtgggtgaatagagggatagacggattggcggatgagtagagggatggtggatgggtaggtgggtggatggatagatgggtgggcgaatagagagatggtggatgggtgcatgaatagagggattgtgggtgggtgggtaggtgggtggatcgatgggtgtggggcagatagagggatagtggatgggttggtgagtggttggatagatggatggatgggtgaatagagggatagtggatgagtgggtgagtggatggatggatggatgggtgaatagagggatggtggatgggtgggtgagtggatggatggatggatgggtgaatagagggatggtggatgggtgggtgagtggatggatggatgggtgaatagagggatggtggatgtgggggtgggtggctgggtggatggatggatggatggatgggtgatggttggaaagagaaaaggttggtgaccatctgctgtttgtaattccttacggagccagtttatggaacttgagcacgtttcactgaatcacaccgctaggagctggtcttttcccttaacctcttagagaagcacgactcaggattgttagtcacttggagagcatttcacaggttcccttttcgctttggtccccagaatccccctcccctaatggtactggtgagaggcgggctgtggtcccagcagggagctgcccacaagcctgtcctcagctgtcacctcagaagttcatggcctctgggtcagaacagaggtgtggaaaagccacctctgccagctcagggattttggcactgatggactcccagcaagggccctgaggagaaaggccatcagactccttcaatgcctaataaaatgcattcatcctgccaagacttatttgccatttaaagctcacacctgcgcctgcacggtaaactgtcaggactgcttttccagcagaaagcatgcttgcatctccgcacctgcacagagaagggaaagggtttgtcttttcttcccatttgaatatctgacctgtagttcagctggacaagctaaacactcaagaaacgaagtccctcctgacccgcgtctgtggggcatccctccctttgcaaactgtccctgcttggttttctagaccgaatgcaaccccagtgccctctgggctcccctgttctcctcccttctatcttggcaccaaacgtgatctgcccctatcaacggcagggccactgagatgaaaacacaggcaaacctcttcatgccgcaccttaacgcatggcaaggggaggagaaacttactccgacaggcagtgtcaaccaggaggcttggaaagggccctgcgcccagcacacagcccccagtgaaagagaaccggttccaggaactccgttcctgtaaacggatttcttttgataagtgccctgtcaattaaaacccaaactgattttctgttctttctcaactggtgtctcccttccagaaagttcagcagtacacagtcatcgttcaggccacagatatggaaggaaatctcaactatggcctctcaaacacagccacagccatcatcacggtgacagatgtgaatgacaacccgccagaatttaccgccagcacggtgagtccctcgaagctgcccagtgacgcatggcccgtgcagggcaggaatgcactggcgtgcggcacagcctcctctctctctgcggctctgcctgacgggcacttggcagatagcgtgtaagaaaggccctgggcagcggaggctgctgtgtggagtggctcgattcctgatgtgcgcagtaggagagaggccggggctcagtcagggaggggaccggcggcggaggtcggttgccacctgggaggcatctctgtgatgtctggaggagttgactggtactgcctgggctgatgtcactgccactttggaaggcctgcgtgtgggacccgcttggggaatgcccagatggggccttggcatggcgggtccatccctgtgtgtggaacttggctgaccctctgtggcctgctgtcggcagaaagggggttgtgactgggccccataccggctgcctggggcctgagtgaccattcactgaatgttgttgaaagtccagtgtgagccccgagcccctagttcacaggggaccaaactctctctggtgggaacacggtggagacagggctgtaaggcatgcagcccccacttcctctggattccagcagggcagctgcaccaccaggagggacccttcccttgaaatctgcagaggccactgcgccgacagacatttgatgaccccacttccctgctgcccagcgatctggggaggtcccggccttggctgtcgccctgcttaccaaccaggaccctttgtggtgattccctgggtccatggggtgtgacacggtgtccccaggctgtcattttgggccccgtgtggcagtgctgacatcatgggcacgtggcccagccccgggagcccctctagaaaggtcgaaggcaccaggctgggacgtgcagaggggagagtcagcgagggctcccagagtggccgtggccctgagatgccaggatctcagggtcttctctgctcctaccaccatatcacccccttctcccccaggcctaggcccccgcagagctgtgtgtcagtcatgatagcaatgacagtggcacaccagctgcatctgtggaggtgcccctcgggcaccagggtgaggccagggtgcggccagggtacagccagggtgcagagctagcctctgatcccagccaaccccgaccaacccagtgacagatgaggactctgggctccgggaggctaagagggagaggggaagggatggggtcaggagggagacgctcctcccggtgggtgggccggcttgctgagaaggcaactaaggccagagcccctcgccacagcggccgtcccgcatctgggcctcctgcgtcctgcatcccaggcctggggcgcagctgcaccaggcggaggtggctgtgagcacacaacgccatctggtgggaagatggcagatcacagcgaaggaagccagctcagccccactgcagcagggcaggggggctctaggtgctcccccaggctcctggcagtgagtccaggcagcaagcggccagggcaaccaggagcccgaggagcatttaaccgggcgcagccccaggatgcaacagctctcatacaattggccaggaaggcgttcagatggtttggaaaacacctgcttctctctcttggcttcagtctctatttgctctcttccggccagtgagcaatggtcaggaaaagctcagggccaggctgccggggagtctggacataggggaagcagctgctaaccccagggccctgaagaataataacgtccaggcccaagagcgcagcagggctgcacccacacagctggccggacagccccagctgtccttcctccctgactccgagaaagaaaaggaagtgatggcagggagggaggggagaaggtgacccaaattgtgtggagcaggtgtctctgcctttctcggagccagcatccctgtgaaggaagatggagaaccggcaggatgtccctgacctgcacatgctctgaaaaacggccagcccagggagtcacactgagccccccacagaattctgcatttgactcaaggcaacttaaagcacattgcaggggagaattcctgcctctgtgtccccatgaacgaaaggtggggatggcctgattctctgagacgttggggggcagaagataaacaaggggcattgtggtcctaaatcccaaaattcagagaatcccatcattccattgcaagccctacccctcgtctctggtccccatcccgagactctgggaggcaagccctacccctcatctctggtccccatcccgagactctgggaggccaaggcagaggcccttctagacctagtggaccagccacaagcactgaccagcataagcactgaccagcactgatcagccaccagcgctgaccagccaccaccatttaccagcactgaccagaaatgaccagccaccagcactgaccagcactaaccaacactgaccagccatgaggactgactagccaccagcactgaccagccacccccactgaccagcactaagcagcccttggcactgagctaccctcgccgcaactgctgaccggccacaccaccctggggctcctcctcctgggactggggcagagggtccccatggcatttattagagagaggcgtctctgtgcttttccaatggctaagcacaggctactgcagcctcgtgcgcctcccagagatgggccattgtccatccttggttccagggggcctcaggcaggtcccagaccccagatcacggggcaggggaacggcatctcttgaggagtacgcagatatgtctagatgcttctcagccagtgtctgcggcacctcccagtctaacacagtccgggagaggatctgcagtccactgctttggtcaggccggcggggtgacatgctagtgggtggacaatggacggatgaccctggcagggagggttccctccaccctgcggtggcttttccaggtgactgggtcgcatggtcctggagaaggggtgtcagtaaatactcggggttaggatggcccttggtgtgtcctcctagagatgggtgacaggcaggagccccgggacactgtccatgcctcaccgtgggacggagcaggcagaggggccagcaggatggcgaaggccggccacactgccgcacatgccgccaggctatttttaccaagcctaatcaagaacaatcagcagaagctacagagatgcaggggatttgcatgatccgattctgagtcctaaatgttaattaaaagttattttcccttcactggctctgagcgcggctgcactgcccacgtgaggctgagtggggaccctcggccctcagcactccctccagcaggtgagcatggggtctgctgcgctagaagctggtggccacagaggacacaagcttcagaccctgccccaaagcctcctattaacaccgatgggtcctgcagtgaagttctcagggacaggtccagacagcacagagtgaccctggagatctggcatcacaggccttcctccaggccacccccaccccatccacacacatgctcacggagggggggtcccctggagtcaggaagcccagccctggccccacccttggtccctgcctgctgtgtagccaaggccggagagctggacctctctgagccgcaggattttatcccggctttccacctagaattaatcccacctcaaggtgtcgtcgggagcactgctgatctatgtgaaagtttaagacttcagcaatataaatctgctctaaaaatgccatgggtggtgcccagacccccatcccaggggcatggagctgggtggcgagcagacaaggttccagctttaacagacctggagtcctgtcccgtctcggtctttcataggtgaggggcttacaacaatgtcaccaaaaccttctcagcccagtttccccagctgttaaaagaagagggagggccgggcgcagtggcccaagcctgtaatcccagcactttgggaggccaaggtgggtggatcacgaggtccggagttcaagaccagcctggccaagatgtgaaaccccatctctactaaaaatatatattttaaaaaaaaattagccgggtgtggtggtgcgcacctgtaatcccagctactcaagaggctgaggcagagaactgcttgaacctgggaggtggagggtgcagtgaatcgagattgcaccattgcacactagcctgtctcaaaaaaaaaaaagaaaagaagagggaggtggtatatcattgttgtagtttaaaatgcatacatgataagacatattttgtttttactgtatgtcttttgtgaatgatctattccccgtcccaagcaagcatgaataaaatcaggttaatttttttcttttttgagacagagtctcgctctgtcgcccaggctggagtgcagtggcgtggtctcggctcactgcaacctccgcctcctgggttcacgccattctcctacctcagcctcccgagtagctggaactacaggcgcctgccaccacgcccggctaattttttgtattcttagtagtgatggggtttcactgtgttagccaggatggtcttgatctcctgacctcgtgatccgcccacctcggcctcccaaactgctgggattacaggtgtgagccaccgcacccagcccaggttaaatattttttgaataaagagggaagggagtcgtggtggtttccccacagggtctccgaggacaggatgagtgggtccccagcgtttaggatgtgcccagctcagccagtgcctggttatcacagttgatgtggaaatacagatttttctctcaaaggggttaaaaatggttttgccagaggcagggtgtcagctgaacttaggagccctggggtctgtgggtctgtggtccccatgtttttgaggtccttctggaagttccctccccaagccgcccgaggatgctgcctgcggtccctcctcggaagtgaccctcctggccaggaagaagggcagccccagctctgcagggcagacaggctactggccagcctcagcgggggggactggctgggctgacccagggcagctctcgcccacagatccccagcccctcaagcctggctgcgtgcccactctggccaagccctgtgagtccctgacttctgcagaagaagggagaaattacgattcagcgtgagttcctgagcacaggaatttggcatcttaaaattagaacggactcagtgcccttaattacgcttgggtgcacagtgcaagcctcggccgcacagtgcaagcctcggccataaatcattaattggagccaacttttccgagcacagaggtggcagccgcagggaccaggagctcccacccacccgacatcacctcccgcctccttgctcctcctaccagggacggcttcccagagacggctgcagagggggcgcttctgagaggccaactctgggtccaccctggggcagggaccaacaggacacaggcccagagacgtgggggaatggcggactggaaaggacaagcccaaggcagagacacacagaaacttgaggtccctcagcctgggggtcaagacttagtcctcccagccgcggtgcttccgccagtctctcaggcctccttggacccgcctgtccaagctgcatgggagagatggggcccaggggttgggggtgggcgctgggccagactccccagcttcaagcctggctccacaactgaccagctgctgaccttgggcaagttgcctccctttcctcatctgttcctgcctgatgggtgtgtgaggaccgaatattcccggatatcagtcccttggcagcgtacctgactcaaagaaagaccaatgagtaaaacagcaacaatatggccatcgtggctgttgtatgattaataatgccgattgatagcaattgtgtccttcaccctggcacagatgagctgctgacaggagctgcctgaagttgtgctccaatcccgggtaagaagatgggtcaacctctctgtcctttctgggaagggagcaagccaatctggtctatggacccaaaagcccaaaaaggggtttcaggttaatttttagctaaatgactggtcctttcactcaagcgggtattgcagtgagcaggagcaggagcaggaggagtaggggcaggggcaggggcaggggcaggggcagggcctgcaacttccttctggtcacaagagccacagatccgacaattctgatttgtgaactcagaactcagcagaaatcgtcactgttttactgaatagaacacagaattgcaaaaagcaataatgttgtaatgtccaaaggagctgtggtttgtaggtttacgctatcaattttccaatgcaagcaatcacagaacagagaactacagctggctgtgtccccaggtggctcccagccccgtcggggggcgcagcagaccacaccccagccagacaggagccgtcagggccggcgctcagctgtgctagttacagtgatggatccgctgagctccggctgggcaagagcaccaggcttgggcacttccctccaattagatgccctcgtccacaccgggctccggccgggagaagcagcacccaacgccgggtggctgggaacgtcaaggcctcattaggaccagccggacgcttctgagtaagcggcagctcagtgaaagcatcaatcccacgctggcccatggggttggggtgacaagggcagcagcagagtcccatttccgctcattcagacctgctccgtgggaagaggcaaaaggaggtcctgagccttccaggagacaaagctgggcctcagtggcaccactgtccgtcagaggtggaagtaaagttcgcagtcggccgtggctcatctttatgagatattgactcaccgccactagtctagttgccaggaaacaggatgtgggagggacagacaaaaattaagtacagcagcaaatcaccaagatgcagtcctgcgtgtcacacctgaggagcagcctggagccaggggcaccttctggcttccagcaactgatggaaattcaaaccatgacgtgttcagtccttggagttccagaatcgtgaaaggcgggtcctcggcaggcgtggaggcatcgtggatggccgttttcagagcagggcaggcagcacaaacggatgaacgatgcagaggcagaaaaggtcaagccggggcctctgaaaccaggacccccggggcctccattccaggagaagcagcctcactctgcccttcaccagccacggagacccggggtctatgggcagtgccctaaatgccagccatgccctggggcacgcggtcaccaccccgcagaaccgctcccgtgctcgttgcaggagtgcaagggcagatccacagaggagcgtgcggggccccaccttcccagggatttgcaggcaaatgagcggccgttgacacagggacaggcacaccttttcttgaatggtctggagagtaaatgtttgcgctttggctgccggaaggtctccgtggcaactccgaaactccgccattgtaggacaaaaacaaccacagacaaaacagaagcgagtgggtgtggccatgtcccaataaactttatttacaaaaacaaaaagattcaggccacaggcttgttgtcgagccctgacttcacctatagcaaagaggctacataggtgtcgttttgggaatatttgaaggaggaagattctagcattgcagacgtctaagtatgaggtcagcgcctcgtcaccacctgtctcagagagctgattaaaaatctcacaccacacacagcagaggtggcacaggcctgtagctccagctacatgggaggccgaggcaggaggatcacttgagcccaggagttcgaggctgcagtgaggtgtgatcatgccactaaactccagcctgggcaacagagcaagactgtctcaaaaaaaaaaaaaaaaaaaaaaaagacacacagtattagcattgaattaaaaaactaaatatcttaggaaacttcgtgtgccacgtgccaggccttgttcattatgtttgcacattcattcattcattcattatttcaccccgcactgggcactccctatgccagggtacaggacagctacagagaaaaccaaagcagtcacagcccctgctcctcagaggttaatctacatatttaaaatctgtaaggccaggcatggtggctcacgcctgtaatcccagcactttgggaggccgaggcgggcagatcacctgaggtcaggagttcaagatcagcctggccaacatggtgaaaccccgtctctacaaaaatacaaaaattagctgggcatgatggcgggtgcttgtaatcccagctactcacgaggctgaggcagaagaattgcttgaacacaggaagtggaggttgcagtgagccaagatcgagcaattgcactccagcgtgggcagcagaagagactccataaaaaaaaaaaaaaaaaaagtgtaaatgtacatattttatttctgtggattttggtttttcccatttttctaccatgagcaattgttattcattcgcggatgtataattccccattccaaacaaaaaccgtgaaggtgacctctcaagacaagcagggtatggggccgagaggcagcccccagggggccagtgcagcctcagcgacccttccccaccgctggtgacctcgggcaggttgcctcctggagcctcagtttcgttacctgcaaaatgggaacaataatataatcccctctgcctcctgctcccaaaatgctgtcattctgtttccctggggttgtcaccagcatgagcccaaggtgccccttctctgagacaggcctgtctccttgcgagggcccgcaagcttctcctctctgctgctgcccgctgccagctgttttgcgtttctgctcttgcaaatgtggcttctcttggtgctttggaggcatctgagtggccgcccctgggacttcccccaagccggcgtcctgtgggcttgccccagcgggggacagcagccagtcctgagagtatgggctgcagggcccgtagccccacccacaccgagctggcgggagccgtcatcggggcctccaccagggattggatgttaggggcatgaggatcagcacggcagcaactcactggaaggggcgcaggcgtgccaggggctgcggctctctcgtggggctcccagtcctctgggtacctggagttcatggtcatggagcatgggggtcaccaggcagctgctgggaactggtgggatgtgggacagggtgtgccctgtgctctccctggggactctccggcagcttctccctcttccgtctctcccctggcccccttctttcttgatgaaacacctgcctgggctggagtcctcacgcccaccagccagaagtcagctttgtctgcaccgtgtccccctggtctctcggcatctcggcaggcacagaaatccaccccttagccctggtcattacagcagcaggtgggcaccgaccctgtaccaggtgctgcaccgagtgccctgactgtgccagcccatccgaccccacagcctcctgaagaacgggctccctcctccccgtgacacagaggggaccaccctgctgtggggaacagaacttccctcccactgcctcccacgtggccgcttgccgtgtggcagatgcgggacttctccctgaagacaggaccaccgtggccccagcataggtgccttggaggccccagggtcttgctggacattgtgtggatggggcctggccctctcggccctgaccgcccactgacatcataagggaacagctgggtgggtttttcctgaaacaccggctgtgctgcagggttcctgcccaaatcctcctcttgcgaatggtgaccttcccctgagaagctcacagtttctgcctcagagctgggattgtgccggaaggccctcgtaggaagacaaaatcctcctacctctcgggatgggtgcacagttgaattctagattacagtctcggcaacaaattccattccgatgctcttaaaatttctcctttcccaaatacctgccttttcatcccaaggggcctgagaggctttccttgtgtcggaaaatctgaaaaaattaaatttaaaagtcattatggctgggggaaggttaataagaaaattctaaaccagatttatcagctaaggccttctttgtgaacctttattaaacttgcatgatttagaatagactctttgtataaacttcactcagaagtctgcaagggaatggacgcagagagcgccgcgctccctcctcagaaggacgggagtgagtggagaagcgtcagacaggccctcgctaaaacagcagacaacaccaggacccacctggccatgtaagcagagacagacgctacagaggatgtgaggggccacaaaatccaaggggccaggagcttcaggcacggccgctccaccaggagggtgccctcctgcccccaccactaggcacagagccttgcccctgctgcctgcaagggtgctagccacaccttctgcctctgctggctccaaagctcaaggaatctctgcagtttgccaggatcaggccctctctgcctctcttctgaaccacagacagccaggtgcacctggctggcatgtccctaggtcacttacctggttgtggctgtagaggaggccaggaaagtggatatctggaaaataaggaagggaattcagaaggtgcaggggaaccaggaagcctcactaatgaccactatgctgaccctggcagcttgaaaaaaaagagagtggctcatctcacaagagctgagaagtcttggaaaatctctcccttcaggcatggctggatctaggctccaccagctcaccatgacgctcccctggaccatgcttcctccagccggctttgttctcaggctgcgaatggcggctcccaaccaacccaacaccttcagattcacgtggttaccatgcccaggccagacgcaggggccgccagaactgacccctaattggctgacttaggtcattagcctatttcaaaccagttattgaggcgggggcctcaggggtggagaacaaggatctgaagcattttcagtgaaggaccagatagtattttcatctatggtcaggctgtctctgttactgcgactcaatgccactgttggggcaggaaagcagccacgggtgatatgtaaatgaatggggtgtggctgggtgtcaataaaactttatttataaaaacaggcctcgggccaacaccacactagaccaagctgaccagagcccttcatcccaccaagcccttaaggaaacttggggtgacatggccgcaggaccggagcggcatggtcctgctcaaccctcccacagaggcctgaaggccagaagctacagagggctgccaagtggctcccgggggaggccagcaggttttcactcaaggaaggagaagcgccctaagattcaggcaggctgctttgggggcaaggcagtgtccccagcggagggagtggccctgagccaggtgtcagagcccagcagtgtgtgctacggggccctggcaggctgctttggggcaagacggtgtccccagcagagggaatggcccggggccaggtgtcagagcccagcagtgtgtgctgtgggccctggcaggctgctttggggcaagacggtgtccccagcagagggaatggcccggggtcaggtgtcagagaccagtggtgtgtgctgtggggcctggccagagcagcgtctgtgtgttcatggcatctctggagagggctcagggtcctggcacccaggacattttgcaactcagatctccggggtcaggggagctcactggccttgagtcctccaccagccactgcaggggtcacctgcctgcctcactgacgatggggcaggccaccctcctccctgctccaggtctgcaaagctcccccaaccctgaggccctcccaccaccacctctgcctggagatggtccaagcagggagtgtataatgtgacccagctaccacctcccctgaggacaccagggggactatcacctccacctcacagctctgtcccacccccaggcccccccgggcaccaggtcagctcctagactcacagcaacacggacctggctgaggagggctgcccctcccgcccattccccggcccttctggaacttgttcacaggcctcagcgaagcttccttgaatgtccccctgcagtggtcctctgcccggggcctggccgcccaggatcccgtgtggccacagcctcagcaagggctgtcctctcacacccaaggactgcagggctgagatcaggcaggcagctccctgtacctcactctcaggcatgttctcacccccagaacatatggatctccaaccatggcctgagtcgcccctgctatcccccagtaggcaccatcccccatgccatgatgccttgcagtgcagggcccagtgtgtcccacggcggcgccagctccttgtcctgctgggggacgatctgactcctgggcggctcaaaacgtgtgatgaagggaagacagagtgagtcccgaagctccctcctctagggccaggtcagcgtctccaggcctccccgggtacccagctgcaggttccgggctctggccacctggctcaggaacagagacagctgggagattccgtcccacactagacatcgggagtggtgggggcggtagctgtccactctggagtttagcaaagacggttcctcccaatcctcagatgagatctgtggctgagcgtggccatcgtgtgaggaagggctcctgctccacagacagggctgagatcccactttggataaatccacaatttttcttcctaacaagctgattgtatcgggatgtgaatgcttggacctaaacgtgacaggcagggcccttcctaccagacccagagctgggccgggctgcggggttttcagcccagcttagagccccaggtcgaggaggctgattaaaggactttctctgagcttttgaaatacagagaaaggacgcagtgtttgtctgggattaaattggaatatttttccatccttgacaaggcagcccgttggtgtgggctctgaattcttctgtcgcgtcgccgtcctttttaggaatgctgactcggctcctgcctgggaaaggggaccagcgtatttcatttttgtgcatttatatgaaggctatcactcattccttcattcattgattgggccagcagggacagtcgccatctgtatttccccggaccctgttcacctgatgtctttgtccactggtctaatggggcctccacgctcatgacagatgcacggaaggggcgcgggtgggtcgggtgaatctgcgccatctcacagcctcctctcacaccggctctgagattctgggcccagaaccgctgcctcggggcctctgtgtgcttctctgtccttgcaggacctgcctgtggcagacgcggtctgctggccgcccgacgcccgtttcccaccccttctccgtttcccacctcacaaggctcccttctttgggcttgtggtggccgtgggacatcgccctgtccaacgggagtgtcagcacaagtcagctggggaggggcactccgggaagactctttcttaccgaagggacagctgtgcttctcaggcagccagagggccaggccgagctgcagggtcctgaccatgggaggccggggaaggacaaagccccgtcccaacgggcccagccacctgcagccctggaaggtcaggctcctgggttcaggtcaccccagtgcaagtttctgtttgctgcacctgagggcttctccgtgactcctggctgagggcaggtgtgaaggtggcctgggtaattccccagacaccctaacggccttgttttaacttggtcacctctttaaaagtcccatctccaaatacagtcacactctgaggccttgggggtttagggcttccacacagaaactccaggacacaacattctgcccctaacagtgcctcatgccaggacacaggggcttcccacccggggacactcccggtggaaggggagcagagctgcctgcagatgtgcacagcagccctgtcctgatgctccagcgcccgtcctgggaggaagggtacctgatcacagcaccgtcacatcacagagcgctgctcagccatctcagctgcacgcagcaacacaaaggaatcccagagccacagtgcccagcagaagccagacacaagtgctggaaggttccgcccatgtaaagaaaaaacccaggtcaactcatctgtgacgccagaagtcagcatgagcttgcaaggttcctgcaacaaatggccacaaactaggggcttgaaacaacaggaatttattctgtcagttggaaatcaccagggtcttgctccctctaaagactccagggagaacccttcctgcctcttccgggttctgctggccaccctggtgttcctgggcttgtggtggcatcactctagtctctgcccccatctcccacggcctccccttctgaatatgtctgcgtcttctcttctttgtgaaatcccctctgcctccctcttctgaagatgcacatggtagcatttagctcccacctggataatccagaaaaatctccccagctcagaattcttacctccagcaccttttcttcctacaaggtggcatttctagctccaaggattgagatgtggccatatcttcggggacaccattcaaccagtacaggtggaaactttgggacctggaaggggtctggggtggggactgggaatgaaaagaagtgcccattgttgaagccgctccatcagtggccctctgccgtggctgcagggctgacgcacctgccgggcaggtctgcacgcctgcttcagtggggccccggcagccgtgctatgaggcgtgcactcccgtgcacccctgagcagcctgtcttctctgattcctgatctgggcgtggctgacacggtgtgttctgtttgtgaacactcgttgagctgggctgacacggtgtgctctgtttgtgaacactccttgagctgggctgacatggtgtgttctgtttgtgaacactccttgagctgggccgacacgttgtgttctgtttgtgaacactcgttgagctgggctgacacggtgtgttctgtttgtgaacactcgagctgggctgacacggtgtgttctgtttgtgaacactcgttgagctgcacatatgctacgtgcacttctctgtgcatatttacacttaacacgggtttgtgacattctttccttccattttgcagtttgcaggggaggtccccgaaaaccgcgtggagaccgtggtcgcaaacctcacggtgatggaccgagatcagccccactctccaaactggaatgccgtttaccgcatcatcagtggggatccatccgggcacttcagcgtccgcacagaccccgtaaccaacgagggcatggtcaccgtggtgaaggtgcgtactcttctcacaccctgccaggcaccccaagttctgccacctgcacactccctaggaccagtcaaacaggagtgatactcggtgtaaagttactgcccccctaatatccaagggtagaggcaggtaacccaacctgctggaggcagacacaaccttcacaaggacctgtcatgtgaccttcaggggcttggcagaccccccaaaaataccctcccattcccttttcaatgtctatatattcactcccaccccctaatctagtaatgggcgaatttcattattagaattcctaatgttaaaccatctttgcattcctgagacagatcccactgagtagtgaggtaatattttgtaacacattgaagaatttgttttgctgatatttgaagtttttcatgtacttttctgggtgatttaggcctatagcgtcctcatctgggttttggtatcaaggttacagactaatctcaagagtttttctgtcccagagacaggtcttatgatgctgtaataatctgtcccctgaatgtttcgtcacactgtgctgtgaagccattgagtagctgtagattttgtctttttggtcgtgcttctttttgttttggagagagatcggtttgtaactactggttcaatttctttgatggttttggtcagatatgttcttctagaaaagtgtccatttaatctaaattttcaaatttacttataaaggcctatcattatagtagtagtgattcagtcttctaatctaactctttttctacactcataattcatattcccctggaagggcagattgggaattatatcataacacttagcaatcgtttacaacttagtgtgaagaagtttagcagctattgtcccaaaacaattttgaataggactaagaagaaaagagcaagagcacattgggcatttttagagaaaaggaggggtgacagaatggtgagcttaaagctgggtaggatctgccgaagcgtaaggaaaagcaagatgagcttaaagctggataggatatgccaaagcataaggaaaagcaagatgagcttaaagctggataggatatgccgaagcataaggaaaagcaaggtgagcttaaagctggataggatatgccgaagcgtaaggaaaagcaaggtgagcttaaagctggataggatatgccgaagcgtaaggaaaagcaaggtgagcttaaagctggataggatatgccaaagcgtaaggaaaagcaagtttcattttgagttggatcatttagaaatttccttcagcagcccggagcagagacttaaccacagaaatttaaatactcgagagttgtattctctcacgtgagaggagtctgaggtgggcagttggggccaatgtcacagctgcacaatcaacagaaaccctggctgcttctatcctctgctctgctgtgcacacctttcagcttctagggcccctcgtggtccaaaatggctactagagcaccagccattacgagacttttacaggcggtaggaaatcaaaaaggggggaagaatggctcacccctcctttattaagggaccttcccagaacacctgttcacatcttctggggcagagtttagtcacatggccattcttagccagagaagacactgcataacataattatggaaacatatcccaaacttctcctaaggaagaggggagctagatgttaggagatcacaggggaagaaaataggctttctccaggatctgtgtcttttctcaacaccccaaagtcatctttttccttttcttaataacctcttttgtaagcaagctagtgaagaccagttctcctgaaaaatcttataaattcttcatcatttttattttatgaaatattcaaacatacacacaagcagaaataatagtgaaatgaacttccgtatacccatcacctagatttaattaacattgtgctacatttactaaatctttttattttggctgatatgtttgaaagtaaattagcatgtcacagcattccagccctaactctgtataagctttcttcttcaagagaggctattttttcaccgtaaaagatagttcttagagaagaggcaaaatacacgtttcacttcccctctaattatgaattttcagagtgaggtattagcacagccggccccccagtggcaaagtcagatctgtgtgcgcagggactgggcatggtgaggaaggatgtggcaaaccctttctccttttctctgggcgcatttgacctcaagctaacattctagctctggcctctagaaacccacaaggtgaatcgtcagctgctttgctggcaacgttgctcatgggaaggtgatggagactggatgtgacatgcaggcagaggagaggagtgagccgtgagcccagagctggctggggccttccccagtgagtagcgagcctcggcccatctcctgcttgtgattccaaggaggtatctctgactcccacagctcggattctgtggccttcacggggagcacaacgggcagcccccggccccaggagatcagcacctgtctcacctcccctgcccttggagggccacttctgtagctggagcacacacagccccgccaccttcatcagcccaacatagatcagaaagggccggtaccaaggaagaaggctggctcgatgtggtggggaaagcctgacccctaaggactccagggaaggtggcttcctgcccagcccaggggctggtggcctcagccgtcatgtgcctgcctggccctatctgcgcggagcatcacagccacggaaagtggaagagcacagccaacttcagggaagcgccagtgtcttgggactgcatgggcctcgtggcactgggccaggccctcagcaggcccacggagccccttggcaggcccacggagccctcttctgttcttcagagaggagccactggttccaagcatatagcacagactagactgtggggcatggactgagggtcccaggagggcctgggcaccgccaccccgggaactgattcctgagatgggaaatcatccccttccggttcttcctccagctggggatgctcctgagaaggccgctgggagagtaactcctccagggctcagctgcttggcagccatatcctcacagcaggaaggccctggctggcaggtgggtggggcatgaattttggaggcagagaggaggtgctgacagcagccaggtgggcacagccgggcacattcactgacctattgccatgtgacagcttggcagcgggccaccctctgctgagtttgtgccacgtcccttcccctagccatcagggtctcctgtccagctccaccctctccttgtcaggcctctgtctacgtggtgagaatggggtttcccgaagcatgtctacagaacgctggttctcaggatgttgatgagtgctgcctgcgagccacgttcgtagctaaaatctccccaccacctgtgcctcctgcccccccacagccagtcaacatcagtggcactgaggccattgaggggcctgtgaaaggaagatgaaacctcaggaccccaaacccactatgccaagggaagtggagcatggggactgagtctcacggtgctgcctcccttctgtggccacacaggtagctggggcttcacacacctaccccggcttctgtgaaacgtggatccactgagcactaagcagagcctcgcaaggatgtagccactgtctcattgcctacccggcccccgcttttttctcctttcctcctccctctcctgtctgctctttcctctttaaatattgaagtcctcaaaaccctctttgggaaaagcacaggacacagatcccactgggacttgtgcttcttcttcccgggtgcgggctcagcctcggcagaataaccctggaatcaacggagatcggtgcgggctcagcctcagcagaataaccctggaatcgactcagatcttgcaggccccatccctcaggcctgggaggcttggagacctgccatgctcaggggaacaaacatagcccctgcctggtaccccgcatctcccaccagagcaacagaaactagaaaggtgctgccactccacacccacaggcgggctggcacccaccagcagaaacccagatgtgaaaatctgcagattttcagatttggggcttggggtgcattttaccttttcacagctgccgtcttccccactgggcacaaggaggagcaaaccaagttcctacagcactgcctgctgcatgtgcctggagggctgcagctggctcaagtcttcatgacctagagaactagtgccgtccctatttctgcacttctccagatctccagcaccctgaaactcccagggagcctcaggccaggccccaatgtgatcagctacagtgacgttgggcaccgataccaggtgtgccatcctcacccccatctcacttggtcctcacgcccaccaaggaggtgctattcttgtcccatttcacagatggcataactgggagcccacacacaggatcacacagtggggactgtacaagctggggctggaacctgctacctctgccataaagccatctgttaaccgtccaggttcctcgctggccctgcctatctgactgagccaaggtgtctgtgtgtgttcaggacaacgttccacaggtttgaggccgaggctgagggctggctgggctgtgtctgctcagaaaccagtcctcttccagggcatcctggcaaggccagatggtaccgtctgaccagcctgaaaccttcctagtgccatgaggaggggacacggaggcttgaggaggggtccaaggcctcctgaggcagcatgaaactctgacccagctgacggtccccagcccaggggccctgagaccccatgatgcctctccccagctgtaagcccaagtcctataatgggaagctgctcagccgtcaaaaggaacaaacgggagatccatgtgacacgcgatgggtctccagtgcatcacactaagtgagatgagtcagaaccaaaaggtggcctgttgcatgcccccatctgcagaacatcccggaaaagacaaaactgtggggacagaaaacccttcaatgctttgctggtgggtggagaggaagggactgcaaaggcacagcatgagagaagcgtggaggagacgggactctcctgcaccttggccgtggggctggccgtgcttccgtacacttgttaacattcctgagagtgactcttactgcatgtcaattttcaaataaattttaaaatttgaggagctgagagcacagacttgcagccacactgtccccaaagagtcatgggtcattgtgtcctaggtagaattcaacaggagaaccacactttttcttttttctttcatttttgttcttactccatatagtgcttttctctgaagtttcaatttagaatctgtttaaggtgtgtatttagtctggggatgcttcgccttagaaaacatttccaaaattggttttgcattctttggtagagacgtcgtcttttcaggcattctctttcggagcaggggagtggggtggaggggaggggttggggagtggcgggtggtgtgggaggtagaaggccagtgcagggaccccatggcccagcccacaggagatgtccagtatcttgagggcatctgttcttagattcccacgctagctctttgctcacttacccctggcatggaccagccacttaatctctctgtgcctcagttacctcaaacataaaatgatgcaaattgtggggcctatgcccagaggcttatgactcacactgaaatagaccctggatataaatgatttggcacagtgcccggcacaaggtaaggactgaatcaatggtattagctgctgtcgtcatcataaccattctcgttatcatcatcatcatcctcatcgtcttcattgtcactgctgtcccgagctggggagaggctcctgatcattctccctgcttagttccccagagcatgaaggttactttaattccatgaagggtcccctgagtccctcagaagagcaggcaccatatcatgtatgtacactgcagacctgaccaggtcactgctcccaaccttcagtagtttatagtctgcagaggggatggtgaggaggaatcagtgaaatattttgtcaggtacacactggaagccccaaatccagcaatgcagcagtgtgctctttccttctctaaaccgacttagcttctgtttctagctgggtccccccaggtggtggtaagtggtagactggcatctcttctgcctcccttttcacacagttgtgtctatgctctgggctgatgcagtgccctgtgcagggaaggagagcactcctgggcaactgtcagaggtgtttggtcacctctgttctcagccatcagtcacccaaatcctggctgcatcatccttcacttctgcggtccagctcggccactgtcaaaagaagtccacaggcatctcgggcacgtcatccagatctgtcctgccccacactcccaattccatctccctagccataccagccggggatgaggaatgcgccttgccacctcccaggctctacctgaggtgggcacacagcttctccgctctcaggtccccaaacccaaataccatctgttaccatcataccctcctcagggcccagcacggcctcttgtctccctcctccagttgtgaaatcttatcttgaaggagcaaggcccaggtccaggctcatcccaggttctttctcgtcttacccatggccctcagttttaaagctaaaaagccaagaaccggcctctgccacttccccttcgggcagcaacagagctggccttcctgtgggaggctcgcaggtgggaattccagggagagcaggtcagtgatggggtcagttcaggcaactcctccccaagacaggggcgcagagtgagactttgaatggaagctcctgagcctcccatcggaggggagcagggcagacgtcctggtgtgtccccacctggtcctgcccactccgcccagccggtgctggagctgctgctcaggcacacgcccagctgctcacctctgagtgaagggtcatggccacgtgtgggcggcagccatgctgagcctcagcgagtatatccagccaccctaatcgaaactgctggagcaaattacctattgatttctccattacaaatgtgttttattttatcttcctgtgggcttttattggccataatcatctttctggaaggcctccttgctcaggctggtgacacgattttttaacgcatgacatgcagcattattccatgtccccgggaacatgagccaataaatatgggagaaagaccacttccctcaggggcttgttcatagcgctaccacgacgtgatgaaacagtctagccacatgagtggccccgtcccagccagctgctggagggcctgggggggcagctgcaggcgttggcatggacagctctgggggggaccccaacacgatgtgggtgcaggcaggtgctgggagcttggaggcatctggagtccagagacagagggaccaaggccagacttgggggtacctgagacccctggtagaacctttcagaggagtgtgctgggttattctggatcaggcgtcccttcaggcttgcagtcagcttgggctgtggaaggttctgcagggtgacagctgcaggtgtgaggcccctgtgtggcacacacaaccccaagatgggcctgggcagtggtggtgaacaagggggtgcccactccctatatcccccaggcacctatggggcacagatgaaccacactggcgctgtgctggacgctggggaggcggaggtacagggcacagcccctgccccaggggtggcagagtcagggtgggggtcatgaaccaacgcagtgagaggtgacagcgtgcatcagggagccacgaggcatctcactcaggactcagggaggctagcagggaccaccccttccttcagagggacaaggagaccacccctggggaggatgagggctcacctaagcgtggtgtcgcggtgattgcgtggaagcgtggtattgcagtgactgcgtgtcacccccaggggcagtgcagggaccgtggggacccaggaccagaactgtgatctctgccactccctgcagaccctcctggaggcagtcatgggcttccaggagccaccgtctcagttttccttccatgcccatccaatatactattatttaggcaattttattttttgagacgaggtcttactctgttgcccaggctgaagtgcagtggtacgatcactgctcactgcagccttgacctcccaggctcaagcagtcttcccacttcagcctcctgggtagctgggactacaggtgtgtgctaccacgctcaactaatttctttttgttttgtagagacagcatctcactatgttgaccaggctgctctcgaactcctaggctcaagtgatcctcctgcctcagcttttcaaagtgttgggattacaggcatgagccaccgcacctggccttattgatgtgatttttaaatttcttctttttgtactgaaatatcttattcagtagcagtgccgagaagtcctgagtgtgacataccagattatgtggttgttcctgcttggaaagatcaggccctgagaggctgtggtggccccggagatggggtggagttggatctgttcagactcaggtgcttcactgccggccccaagcatggggagtggggttcaaaacagcaccttgtgggtggaacaccccaggttccttcctgtctcacctgaggccctcagcttatgaagctccaaagccacaaactggccttttccgctccactgtagacagtgcctggcctgcctgcctgcaggtggttcacgaggggtgggaacgtggggacatcacatcagtggcgggacatggtgccctcatgcttcttggggaaagctgattgattcctccagcagataagttcctctctaagtggaaatgtcttacactgtttatcatgaaagtttccaggcattcctagaagtaggaggaacctgcataattgcgtggaagcgctgtgtcatgatgattgcgtggaagcatgtcatggttgcgtggaagcgtggtgtcgcggtgattgcatggaagcgtgttgtgattgtgtggaagtgtgtcgtgattgcatggaagcgtgtgattgtgtggaagcatggtgtcgcggtgattgcatggaagcttgtgattgtgtggaagcatggtatcgtgattatgtggaagcgtggtgtcacggtgattgcgtggaagcgtgttgtgattgtgtggaagcgtggtatcgcggtgattgcatggaagtgtggtgtcacagtgattgcgtggaagcgtgtcgtgattgtgtggaagcatggtatcgtgattgtgtggaagcgtggtgtcacggtgattgcgtggaagcatgttgtgattggaagcgtgtcacggtgattgcgtggaagcgtggttttgtgattgcatggaagcatggcgtcacagtgactgcgtggaagcgtggtgtcatggtgactgcgtggaagcatggtgtcacggtgattgcatggaagcgtggtgtcacagtgattgcatggaagcgtgtcatgattgtgtggaagcatggtatcgtgattgtgtggaagcgtggtgtgattgtgtggaagcgtggtgtcatagtgattgcatggaagcgtgtcgtgattggaagcgtggtgtcgcggtgattgtgtggaagtgtggtgtgattgcgtggaagcgtgtcttggtgattgcatggaaatgtgtgattgcatggaagcgcagtgtcacggtgattgtgtggaagcgtgtcatggtgattatgtggaagtgtggtgtcgtgatgattgcatggaagcaccgtgtcatggtgattgtgtggaaatgtggtgtgattgcgtggaagcgtggtgtcacagtgattgcatggaagtgtggtgtcacagtgattgcatggaagcgtggtgtcacagtgactgcatggaagcgtggtgtcgtgatgattgcatggaagcgtggtgtcacggtgattgcatggaagcgtggtgtggtgattgcatggaagcatggtgtcacagtaattgcatggaagcgtggtatcatggtgattgcgtggaagcgtggtgtcgtgattgcatggaaacgtggtgtgattgcatggaagcatggtgtcacagtaattgcatggaagtgtggtgtcatggtgattgcatggaagcgtggtgtcgtggtgattgcatggaagcatggtgtcacagtaattgcatggaagcatgtcatggtgattgcgtggaagtgtggtgtcgtgattgcatggaagcgttgtgtcacagtaattgcatggaagcgtgtcatggtgattgcgtggaagcgtggtgtcgtgattgcatggaagcattgtgtcacagtaattgcatggaagcgtggtgtcacggtgattgtgtggaagcgtggtgtcatgattgcatggaagcgtggtgtcacagtgattgcatggaagcgtggtgtcgtgattgcatggaagcactgtgtcacagtaattgcatggaagcatggtgtcacggtgattgcgtggaagcgtggtgtcacagtgattgcatggaagcgtggtgtcatggtgattgcatggaagcatggtgttgtgtaaatctcacagtgataggcacgctgctgcgtggcaatctgcactttttgcaggagtacgtttttttaattaccagacctcatgatcctccgcacctaaatctgtcagaatgcatcaccctcaaaagcacattttgggcagggtgcagtggcccacgcctgtcatcccagcactttgggaggccgaggcaggcggatcacctgaggtcagaagttcaagaccagcctggtcaacatagtgaaacctcgtctctactaaaaatataaaaattagccaggcatggtggcgggcacctgtaatcccagctactggggaggctgaggcaggagaatcacttgaagccaggaggcagaggttgcagtgagccgagatcatgccactgcactccagcctggcaatggaggaagactctgtcaaaaaaaaaaaaaaaaaaaaatcaaagctctatgataagaaatagagagcaaactcacaaactcacactcccagctgtgaccctgaccccattccttccctctgataacgatgatcatttttattagtttttggtttatcctcacgatgtttctttctgcaaatatgagcaaatacatatacaaatcatatttttctctctcttttgcacaaaaggtgcacactatgtgggttgcttttttgcccaccagtagatcctggaaagctctcctcttcagtacacagagggtgttctctttcctctttacggctgcaagtgtctccccatgcagatgtactgcaggctgtgcagcccaccattgctgatggatgtttgggtcatttccagcatattgtctcgacagatactacgcaatgaatactcttatgcatatgttactttgcacgtatctaagcagaatattttaatgcaattgagacacaatgtgttgtgtttttttccagtgaaactgttgcaagctttgccattgaacgtctcagggccccaagctttttccatgtaacttccctccctccccaaaatgtgtaggaaaggcttgagcgaagcttttctgataatacagcatcactgcagaaccgtagctctagcgtttatcagccagggtcctggtgcaccagaagggcaccaaagaattgtgtgaatgcaggggccaagtgcagcagtgatgggaactgcagacctggcatggttctgtccggggctgcggttacaagtcaccacaaaccaggtgggttacaacaatagaactgtcttctgttccagctctgcgagtcagagacataaaatcaaggtgccggcaggaacggtctcgcttaggaggttgtagaggagaacccactgcctgcctctctcccgtttcttggcctgtagctgcctcactccagactgcacctctgtcgccacatggctcctccctgcacctgtgtgtctcaaatatccctctccctttctctctgttttgaaattttggagagccttgctctgtcacccaggctagagtgcaatggtgtgatcacagtgcaccacagcctcaaactcctgggctcaagcgatcctcccaccttagcgtcctgaagccctgggattacaggcgtgcatgaccgcacccagccctgcctgtctgttatgagggcctctgtctttaacttacatgtacaaagacgctatttccaaataagggctcattcacaggtcccaggtggacatgtcttttgggggccaccatctgaccctccgcaactggtgaggccccgctggccaacaacgtcaggagccttccccacactaggctcaaaggaggaaggtagggacggggttaccaggccaggaagaggggccgcccagcgggggctgcagcccccccaggaggagcccagcttctgcctcagcccagcatgggacaggggctgggaggcctagacctcctccctctctcctcccatcggccaaacccagcaggaagccagaagataagggtgcctgggagatgggaccctttggggcctcctggctaaagagcagagcagagaagagctggacatggctcagggaggggtggagaccaaccttcccatgtgtccccccatgcccactcccacgggagctgtgccaggtcactcccagccctgatctgttgttccaggcagtcgactacgagctcaacagagctttcatgctgacagtgatggtgtccaaccaggcgcccctggccagcggaatccagatgtccttccagtccacggcaggggtgaccatctccatcatggacatcaacgaggctccctacttcccctcaaaccacaagctgatccgcctggaggagggcgtgccccccggcaccgtgctgaccacgttttcagctgtggaccctgaccggttcatgcagcaggctgtgaggtgggtgcacaggacatgcctcgtccctgcctgcagcttcccaggttccatacagaagggtccagaaataccccatgaaacccacagcccagaattcccccagatgggtggtcgggggcatctccaacctaaggcgtccttccaggagggagccgcagccccttagtcccagatagccagatgcagcccctgatcaatcgtgagtgttgtgaccggtgcttactcattcagcactgtctagacacaggccggcccgatcctggccacactctcatagctataagactcagcaacctcctgccctctctgctcctcagcgtccttgtccgttcgatggggacaatgagggcgtctgcccacagggtccttgtgagttgagaccacccactactggatgagcttggtgcccgtagccactgcgtggcctgtcctgttgtggggccgggggggagggtgccagtccaacgtggaggggaagccctagaggaggacaaggcctggggggctccaaggagacagagacactggcccaggcccaggccctggaggtgtggccaaggaggcctgggatccagggcagccccgcccacccccagccttacctccccctgcacttgtggtctccgcagatactcaaagctgtcagacccagcgagctggctgcacatcaatgccaccaacggccagatcaccacggcggcagtgctggaccgtgagtccctctacaccaaaaacaacgtctacgaggccaccttcctggcagctgacaatggtgcggcccaccccagggaggcagccgtctcggtggccttcccgtgtcctgggttctgtgggcgagggagggtgctggccagggagaccccgagaggccagcaggcatccagagggtcacccagaggggctgagggggcatctgtgcagacaccggtgatcagggctgcgtcatctcagggcccccaggccatgctccccctccacccactcccatgtcagtcattcattctgccccctccccagcattcacttgcttgttcgaaggtgtgcctggtctttccccccaacgtcactcacccacagcctccaggggcatcagggcactggtcatcccaggcttggctttgctgccctctgcaacctgaaatgcatctcagttttgctgcctgtaaactgaggcactggaatcaggtccacagttttcaaatgctttcagccggcagcccttgccacagaccccatcctgcggggaaggcccagccccactggtcagcagccccgggggtgccgccctcgtgtctctgaccacccacggcacagacccctgtggcccttagtcacagcaggaggcatgagaccctccagggccctgggagtgcagagggcggtggcaaggtcccggggcaggcggcacagcagacgacctcaggagcctggacgggagggcgaggatgggctgggcagagacggcaggaagaaggtttgagagcacgtggggctttctgagggacatgggccagcatctcaagaagcagccaccccttcctggacctgcagtaaccctgcgaactggccgagccccccacgggtcgcacgctctcagaggcatggaggcagggcgggtgggagcagggattctggaaccgaagatcagtccagtaccaccgcttaccagtgggaaaagacgtgaccgctctgtgcctcagtttcctcctctgccaagtcgggggagtcttagtacccctgagaatcaaacgagtcggagtcaccggaacactgaggaagggcctggctcagagcagcatgggctcctgtttgctgcggccgtgatgactgcccgggctgctgtttgccgagtaccggccgagtgcctgccgctgctcatcagtgggtggaacacagtgacgccctgctgtggcttggctgacagcccgagtgtgtcggctggaacctgggtcagtgaatactgatggaggaaactgcagcacaattgaggctttttttctctcacgtcaaagaaggctggaggcaggcagcccagggggagatccgagacctggggcatcctgactgtgccacggcatggcccagaatggctgctggagctccagccgtcacagccatgttctggcaaacagaaggccttgcagggagggcacgggcacacgtctgctactaaggactttcagaaagccccacgcaagtcctccacccacagctcacaaagcccagaacttactgatgcagccacccccagctgcaaggggcgctgggaaatggggtcttctagatggacagtgatgatcccagacaaaatgtaggactccgattattttattaaaaggaaacagaaaatggatattggggatgactcagcagcgtctgccccaaggagaccggagagaaaccagccacgcagatgattcaggcagcaagaagagctgggagaaaacaaaacaggcggctgggaggcagtgaccaggggctccgctctgaggagctgcccttgggaccaagagctgtggaaccagaggagcaagcacgggaaggagggtcacagagttaggaaacggtgtgtgcaaaggccctgaggcggggctgtgtctggtccgctcttggaacggctgtgcgtgaagcctcatgaacaagggtagccattgtgcaaacgctcgtcccatagcaggtgaagacaggacgtggacacccccctgccagcctcccccagccagcgctgcctcccctgccagggtccacagagcccgggctgtgtagctgtgcagctgtgcagctgcctgtgagcccagggctctggtcaggggaagcgtctccccttgagggtcccctgccgcagctcaagccctgaggttaaattagaaagtgattgtgagcccgggccaggccccgtggctcacacctgtaatcccaacactttgggaggccgaggcaggtggatcatgaggtcaggagttcaagaccagcctggccaacatggtgaaaccccgtctttactaaaaaaatacaaaaattagctaggcatggtggtgcacgcctgtaatcccagctattcgggaggctgaggcaggagaatcacttgaacctgggaggcagaggttgcagtgagccaagatcgccccattgaactcaagcctgggcaatagagtgagactccatctcaaaaaagaaaaaaaagaaagaaagtgattgtgaggccgcagctggaacatcggagcgtccatcgcacgtggcagacgccgtgtgagggagccggggtgcacaggctggagcaggagccccccggttaacagaacctgtctgtgcttctccgatcacgtgccgtgccatcagctacatctcaaagcagttttcaaaggtagcgccgcgctgcgtcaccttaaatgtgttttgacgcagcttccggaagattaaagagacatccgtgggatacatttttacatggttcgcctgcctcagtcaaaacacgtggttgttaacgtcaggtcaggagctgccatcaggagcaaagctacagtcagaacatgccgccaccaccgccgcctccaagcctggagagcagacagggcatctctctgtccccagattccagccacctggcctgcatcctgggctgaggcaaggactgagcatgtgaagaccccagggacagggatggcccctgaggagctctgggggctcggcagagcacctccgttcatgctgaagccagaggtcatcgggtcctccaaggagacctcctgccgggccaggagggagcttccatcaaagctcatctggagcggccgcgcctgcttttctcacagacacttccaaaagcagcagttcttccacgcgatcatgcgtctgggctcagggcttccagcaccctggggctctgctgggcagggccagcaaaactcagggaggcaaggaaaggttttgccctaagaagtcccagatgggggcaagatgtggtgggcggatcccagccctcaggggccagtgcagagcccagcacccgcagaacccctccctggctccccagtgggagtgagtccccggtgcgtggctgtgacctccgtggctgtgagtttccacgtgaatgccacaccccgctgtgtgcgtgtgtgcaggtgtgggtgtggccgtgtgctctgccgtgtctgttgaggtgccgtgcgcagtggctgtgtgcgtgtgtgcagctgcgggtgtgggtgtggccgtgtgctttgccgtgtctgttgaggtgccgtacgcagtggtgtggctgcccatggcgtgtggcagggtgtcggtcaggagccatggctggactgtgggtcagtccctgtgcagctgtgttgggagatggccggccgtgtccggctgggggtctgcacatgtgtccctgtgtatgttgcacgtggttgtttgtgtgcgtgtcctgtgtggagctgtgggttggtcatggagtaccaggagtggcccgtgtggtgacctgtgtctgttccacagggatacccccggccagcggcaccgggaccctccagatctatctcattgacatcaacgacaacgcccctgagctgctgcccaaggaggcgcagatctgcgagaagcccaacctgaacgccatcaacatcacggcggccgacgctgacgtcgaccccaacatcggcccctacgtcttcgagctgccctttgtcccggcggccgtgcggaagaactggaccatcacccgcctgaacggtgagcccgccttaggccacggggagggtcagactagcctggggtgcaggcccctgggagacccagctggccttggaagagtgggcaccagaggtgggtgacagtcctccaacaggactgtcccaccaaggctggggacactggccacgcttcagctgctcagcctccttcacctggccttgaggaggccaccaagtcattcccaatttcttgctgctttaatgaggccagccgtgaacatccttgcagctctgcccatgtacatccatgacaacttcctgtgccggttgtcagttgactggaccctgactgatatgtttccttagaatacttccctggatgcagatctgtggtataaaaggatatcaaaattctcaagttttggcagtactgtgaaaatgtgctctaaacatgtctacttccatcgggagagtgcctgtttgtttcctcaaaccccaccaacactgaacattattgttttaaaataatattttattctgccacctttaggccaaagtcattatttccatttgtatatcctgattaccagtggaaattttttatatatatttattggccatttttgtttcttctgtgaattgtctgttcaatgactttgcctatgttttctttggggagtttctttttattgatttggtaaaactctttatatattcaggaaattatttcttcatcctacatgttgcaattgctttttggttgtgtctccaatgtctttttttttttgagactgttgcccaggcagaagtgcagtggcacaatctcagctctgcaactccacctcccaggttcaagcaattctcccacctcaggctcccaagtagctgagatcacaggcttgcaccacacgcccggctaatttttgtattttttactagagacagggttttgccatgttggccaggctggtcgtgaactcctgacttcaagtgatctgcccacctcagcctcccaaagtgctgggattacaagcgtgagccaccacacccaacctccaatgtcttttaacttaatgatgtagcacaggtgtatgtatgtatgtgtggtaaccaggcagccatttcagatttccatgccatcggacttttagtcttttcctttggacgtcttgcttggaagcgagggccgggctctggttgaatgtttactgttgctttgcaccaggtgactatgcccaactcagcttgcgcatcctgtacctggaggccgggatgtatgacgtccccatcatcgtcacagactctggaaaccctcccctgtccaacacgtccatcatcaaagtcaaggtgtgcccatgtgatgacaacggggactgcaccaccattggcgcagtggcagcggctggtctgggcaccggtgccatcgtggccatcctcatctgcatcctcatcctgctgagtgagtgtggctgagcaccagggtgggcaggggcattgtgggtatgagtgccctgtcccaggcatggtgggcagaggggggcctggatttgcccctcagccctcatctctcagcctcatctgtcaggagcctttcagaaatgcagctgaactggtccatatgacaatgggaaattggagcctcccgttactctcaagtctggaggtgcaggccggcccaggtgtctcccatggcctggcccctttccacggctccactctgcctcccagagcccctgtgtcctgaagctgttgccctccaggacctgtgacgcctgtgggcagctcccaggtggacttagcagagggaaggtcagccctgcctgttagcgtccccatccaaagtcccaggacactctctgattggactggcttgggtcacatgcacaccttggagccaatcaccagccaagcaatggagtgttctcactggctctgcccagatcacatgctctagtagtttcttgagtttcccacaaccactgtgggttcccaacaggtctgagggctggcgggggggcggtgccaggggaggtgcttgaaaatgaccccagaggtccctcttcccatcatccctcatggacagtcaccgtggtctgtgataccccagggatcccagtgggaggcagggcggggaagggttgggctaccacctccccagttcacacccaaaccacagggtcccccaccacgtccagaacaggcggcaggcccctcctgcagacctggcctgcggctgacttgagaccccagggaccaacctgagccctgtccaaaggatgtctgagttatgaggactctgcttttttccccatttccagacctatcaccccttgaaaagccggttttcatttctgaggcttgttttgaaagccgttcagtgtcgtgggcttctttgtatgatcaggagtggaaagagccccacagaggttgggaggtgtctctgtagcaaaggtggaggcattctcaccgatgtcccctgctctggaaacaccgggggccaggccccagccagagcaccctctgtgggcagggctgtgagacccaattcagctgagtgcctggcccgtgcaggagacctgggccactctcgagggcagccgcagtggagggcatccgcagtggggccggggccacggtcaacagcagatccgcctgctgcccggcttctgcccagtcgtgggcacctcagccctggtggggtgcatggggggcacccggagtggcctcccctcctccacactcctcctctcaaccctcgctcatcttgtctgcctggatgagcctgggatgccagctgtgagagtggagctgacctcttcaaaggttcttggccttgtggcttccgtcgagccaagactaggcccgggctccaggctccaggttctcacggagctgcacctgcagtgcgtggctcctccctccgcctgcacttccctctccacgatctgggccaggtcaggaagcgtcccccggctgtcacctcaccctctgcaggcagggcgatgccgccaatacccacagagctcctcccaagcctccactccgcttcggaatcctcctcacgacatcaggcagccacagccaattaatcgggttggcaaaaaacagccctcctgactggggggtcgccgcccctctcgcctccgggctcaccctctgcggtacataagagtgcacctgtgattctgggcctcagtcgttacatctgtgacatgggaggtgacgggaggcttcaggaggatgcagtggagtggtttgtgcaggcatttactgggggcgtgggctgcattacctgctcctggagctttgcagatgggtgcgccaggcttttcctgcagcagaggcagccaggggtccagagtgagcaaggctgtttaggggagccagggctggacacggacctcggaaggcaggaagaatccagttcagcttgggggagagggtccctccatccaccccacaaggggactttacctctcttcaatttccacatgcacctgaacttctgagcctgtaccccaattcctttgagtggtggaaagagcccctctgagtgaccccctcggtactgggtggggctgcccttctgtccagcgacgccctggactgaccccaccccaggggccctcaggaagcaggatccctggatcccctctctgggcccctatcctcccagggcagagcctctttcaatatgggggagtccatctccctctctcagtgattcctaccaagacactgtgtgcctaaaacctcacttccacctcctctgacaaagccatctccctcctgctgctcagaagagggactcagaaagacttgtgggtgggcccctcagccccccatgtcctcccgtccccaggcggtgagaggcaccctgagctggctgccttctcaaaaggggagtgcaagaggagggcgagcttgtaaatcaatgactcaaaatgtagcccagtgcccaggcagtgagctggggagagggcctgagccagtgcggctgtgccttggaaactcatgcacacgcacacaggcatgcatgcacgcacagacacatgggcacacatgtactatggacatgaacacatgcactcacgccccatgagcatacacagacacacgaagtacacatggacacatgcacacacagacctgtgcaggcttgtgtgtgcatctacacacatgaacacacgagcacacacacagatctacacgctcacacccaggcacacgcatgtgcaagccttcatacacacgtcctcctgcagatacacgtatgcatgcttacacagacgcatgaagcacctacatccacgactcctgcggatacacgtatgcatgcttacacagacatgcatgaagcacctacatccacgaatgcacacgcacgtgggccgcacatgtgcacagatgtgtccttgcacatccaggcctgcatgtgcagagacatgcgcgtgtgcagtacaggtgtgcatgcacacatgggcacagtcatgcttgtgtgccacctgcatgtacatgcccacatagacacatggcaaacacagaggcacacatgcgcacacccgcagcacaccctgctcacgggcagccctcccccacagccatggtcctgctgtttgtcatgtggatgaagcggcgagagaaggagcgccacacgaagcagctgctcattgaccccgaggacgacgtccgcgacaacatcctcaagtatgacgaggaaggcggtggcgaggaggaccaggtgagactgcggcccgcccccgcctccccacgcgaggccggctctcacgtgtactagtgtctcagcagggattgccctggggtttaacagtaagacatttcaaccttttcaccagtgaaggtgccaggcaggggcgcacggtttcctagcctgggctgagctgtgtacactgcacctgcatcccccacgggggatcctgggacccctcccatcctcgccttcttccctcccatcaccagccccagcccagtgctgccctgtgccctggaggggagggggctccgggttggccaagcacaccgatgcccactcgcggatgctgctgtgtgcagagggctgtcgactgaccaggggcagtgcaccaggcgcccgggagggtagactgtgagagctggtggttggaatctgagtctacccttggcctttcagggaatcggggcaagtcaagtccttaaacccgtctaaagctcagacccctccctgcccctcccacaacacgaccataacgaacgtgaggcatgtgccttgcggaggcccagctcctggccaccttccccgcccctcccgcaacacgaccataacgaatgtgaggcatgtgccttgcggaggcccagctcctggccccctgagcactcggggcacgtggttggtgagcagcgtggtggtgaggtcactcggggagagccccaggccatggaacacagccaagaacagcccctatccctgcccaagggattggggtaaagggcaaggaggtggggcattgtggaggggcacagcaggggacagcatggttctgtgggatgcttggagaccaggccacagggcagcaggtgcatctgtggcccaggtgacagaaaaggatgcagggtggaaggggggctggcggattcttctgatgcccctgactcctcccggctccctcccccaggactacgacctcagccagctgcagcagccggaagccatggggcacgtgccaagcaaagcccctggcgtgcgtcgcgtggatgagcggccggtgggcgctgagccccagtacccgatcaggcccatggtgccgcacccaggcgacatcggtgacttcatcaatgaggtgtgtgcctctcggcagtggggggcccgggcaaggtgtctcctctaaaaattaaattctggtaacacacacagaagccatctccacagtgccggcggctgccgtgggtgggaggcagctcagacccgggttccaggccctgctctgcccctccagcggggtggcctgggcaaatcacctccctcagcaggccctctttccaaggatgaggattcctccctgtaggctaggcgaaggatcaacacacagggccgggtgcacagcaggggcttcgtaagaattcgggtttgcagcagaggcgccagtagcaagcacaggcctcaggaggagaatcagcggggcgacggcggggaaggcgcacttggtgctatgagccctccaagtattaaccttacacagagcccactgccgctgtgaatggccttcccgggctcggctcacccagatgctcagagaggcagaggcccaagcctggtctcagggcccaggccaacttgccccccctccccaccccaccccacaccccaaacatcaggacacagcaggtgggagccacacagaggtggctgccttccagggctgccgcctgaccacctgcccaacctgacacttgagggttggaggggacttgacttgaccaacaagcagcacaccccagccttccatcttcccctttgcaagaaacatttgaaacatcgcttacaatgtcgccagggcaacactcagtttccacttccaacgcgcagctccctgtcttcgttcccgtcttccatcttcctttgcggtgaagagaacagaggagcaagtcaaacagggcagactcctcccagggagcgtcctccgggcagtgactctgaggctccagactggcctcgcctgtggctctgcagggatcacggtgtcctccgtgctgcttctagtcggcgtgagcccctgtggtttcatcacctgctcgccgatgcccactgcattttaaaggaggtttagcaacacttagacctcagcctaggtcagaatctcactttaaaggaattgatttaaacagaagataacccaggcagtgattcaacagaaagacagaaaggtttccccaaagcagatggtgttctgggccacagatgaaattcctacaactgcccacgcagaagctgctctgacaacatgacgcttaccgtctatgacataataaaaacgtaaagatccccaaacgtttgccctgcccagtctataattaatttagagcccactgtttgttagccaggcgcggtggctcaggcctgtcatcccagcactttgggaggccaaggcaggtggatcacctgaggtcaggagttcaagaccagactggccaacatggtgaaaccccgtctctattaaaaatacaaaaattagccggcgtggtggcctgtaatcccaacactttgggaggccatggcaggtggatcacctgaggtcaggagttcaagaccagactggccaacatggtgagacccccgtctctactaaaaatacaaaaattagctgggcatggtggcgggcacctgtaatcccactacttgggaggctgagacaggagaatcgcttgaacgtgggaggcagaggttacagtgagccaaggtcgcaccactgtactccagcctgcaagacagagcaaaactccatttcagaaaaatctaaaaataaataaataaagcccactgttagataggtcttaggagaaattaaaaatgaaaacaacaaaccagtccatactgaatgacactgagtaccctctcccagggtcacaggaggagcaggtgctggcatggaggtggcacccgcgggcactgaggagaggacggggctccagcaacacccacggcactgccaaagcttgtccgtgggagtgccacactcataactgccaggttctgacttctgtccaccctaggtccactttccctccagacaatggtcagctagactggagaaccatctgcctgcccccttagggaggagctgagcttcagccacatggcccagccctcacctcccccacaccaccccttgccctctcccacacccccctgcccttcccctataaaccctcacagccccccaccctctcccacacctccaccttcccccacaccccttccccacaccccctccccttcccccacaccccctcccccacaccccctcccccctctcccacacccccccccccatctgcccttgggttgggaggagctgaactccagccacgggccctgcccaaccctccgcctcccctgcccacagactgctgctggatttgagtttgccccttcaacactcccacgctccatcttcacaaatgcccttttctactcggaaatgcccttcagttaaatgcagagagcccttattggacacctactttatgcaacgtcctacctccctacctcttcttctgggcctcgctttccgttccatctgatcccggggctgagacaacgcgtcctgcaccctaactctgtgtctgtgacccccagggactccgcgctgctgacaacgaccccacggcacccccctatgactccctgctggtcttcgactacgaggggagcggctccaccgcaggctccgtcagctccctgaactcatccagttccggggaccaagactacgattacctcaacgactgggggcccagattcaagaagctggcggacatgtatggaggtggtgaagaggattgactgacctcgcatcttcggaccgaagtgagagccgtgctcggacgccggaggagcaggactgagcagaggcggccggtcttcccgactccctgcggctgtgtccttagtgctgttaggaggccccccaatccccacgttgagctgtctagcatgagcacccacccccacagcgccctgcacccggccgctgcccagcaccgcgctggctggcactgaaggacagcaagaggcactctgtcttcacttgaatttcctagaacagaagcactgtttttaaaaaaaaaaaaaaaaaaagaagaaagaaagaaaaaaaaaaaaaaaagaaagtgccttttggtatgtatcagattccctcaaactcaggagtgtctaaagcagacagaccgtccccaccttcccatcccgagcggcctccaaccccagctagtcccagctctgaaggcatcattcagaaatgggggagactgtgtctgtctttcttactttttttttggtcttttattaagaaaaagaaagtgggtgacttgtttgaaaacagagtggggttcaaatcccagcagcctttgctgtacacagctgggggtctcttgagcctcttgggagtcaaggccagctgggaggcttagcccttcagccccagcagaaggccctggggctggtggggctcagaatacccctaccttgtggctgctccccacccctcccggatgctgtgaggagctcaggcaggggcctggaggggaacaggggtcatcctgaaggggctccacccccagtcaacccaggcctccctcagggacacctgtcaccctgagtgccaccaggtcccctctgcctttggtccagaagagtgagttgtccaaaccagccagcatctggctccagccctccaaccctggcgaccagaccccatggggtgccatcaacggccccgcgacaggcatcaattcaaaccccaggacactctcgacagctccaaccatccggagggctgtgcagatggcaggaaccaaggaccctccctggcagctgaagagggcagttacggttgggcgtggtgaccagaacacacccagcagcctgcgaagcctccccgtccccagcctgtgctcctgattcccgccagacgcttgtgagcctgtgtgggtggcaggaggccccgtcttgccgtgcctacctgtcgcacagatgcctctgcacgctgcagacggtgcctctcctctcctatggaccctcgtcgggggcaggcagcggccgggtccaaacttgctgctgtcctcgaggctggcactgctatctccagggctgggttgactcaagccagacagggggaaggaattggttctgcaggacagtgagagggtctgtgtcccggcacccctgggacagcgctcggctgcctgtgctcactgcatgagaaaactcagagggtgcattctccctctggcatggctgtgtctgggcgccttgggctgcggcagggggcaggccccacgtggggaagcctcgtgcttggtcagctttctgtctctcccaggccagtgacaactggcttcccgaggaaggaggtgaggtaccagggaccctgggcaggacctggtgtcgggcagggcggtgccagcactggggaaggacagggagccctcccggagccccaccctgcacctgccactggggtcagggagtgtctcggggtgcctttgggggcagcatgagctccaccaggggccccggcccccacctcagcctatggcccttccccatggctaaggtcatgccttttctgaacagctttggccttgagtgcacacatctgtgccaggctcacggcatgttcccgttggatgtcagggtccttgtccaaaccaaactcacagctgcccctgtgcagccttcagagttgagctggggtctcagtctccaacctgtcctttctgaccctcccatggctgcccagggagggcggggttcactgtgccacgtgctgggtgcccccctctgcagacagccagtccaggagatggaccaacagaggtcaaggggcagctggccaggccgcaccggggtccccgagttctgagctgtgctatgcaaacaagaatgctcctgtgtgggggggcatggccgttggaggtatagctgggcgggtagtggaaggactggaaatctctgttgttgtttggggaagtccatgcttcagtccttcggagtatgcgtggattgttcgaagtgtgactatggcccgggagccagggcagcatgaactcctttctctgaaatttcgaggcctccttgggttccctgaactccgggctgatgttcccaggacccagcaccaggagaccccagtcccgccagcagccgccgctacccaggagggctgggcgacattggccgcctcccactagctccccctcctcgcccacagcctcttgtcactgccaagcccccgttccttttgcccaaatcacgcaggcggaagctgcagtgccagctggagggatgttcatagggcttcctgtgcccatccctgctccaaacagctggacagcttcccctctacccccaccctggtgagcccctgggggccagagaaagatggggttcctgcaccttcccagctccacctctgaacttgagttagcgttagctaagcatacaatcagtgtcgaacgtctctcttccttaagcttgtagatacgactgcctataatcaggggactcccactggaggccgggaggccaatgctggccaggtgcgagggcatggtttggttcctttagggaatttttgttttgcaaacaggagaaacctgtgctgcaggttggagtggcaggaacgactggccttggtcagcaggcagcccccagcctagggccacagtcctcttcagggcctgggcagccccaatttctggcccagcaggtttctctttgtagtgtctttcagcacatccaaaatgctaggcctcctgccaccaacgtgtcagagcaatgtccaactgtcaggctctcagagatgcctcagtttccctagcatgagcaccagccgacacacacagtccactgagatgataattctgttctctccaaagcaaaaagctgggcgaggggtagtctcaatttctgtcagtgctcaaaggaataacaccaaaagaatcaacacagaatctcccagacacacgtgacccagctcgtggcgccgtgggtccgtaggagggacagtacctcacaacaggcccagcgggggaccacctctctgtacaattggaatgcgttttacttttcttttctctccttttttcattccgattttttttgcatgtttctttttgaaatgggcaaaatgtgtagcagcctgcatgagcacagttgttttggggaaagatactggagtatgatgtactcacacctgcaaatctgagcatcgcgaggttaaacgttccacctttttttgtaatcgtcaacagcacaactattttgtattgttgtttgtatcattttgtaccaaaaaaaaaaaggaaaaaaaaagggaagagagttgatgttttcagtgtgtttccagtgccagacagtcttggtcctgaactcagtagacccttgcggagcggttgtgcgcgggcaggcggggcgcgctgctccagagaatgaataaagtcccccttttccgtagtcggcatcgtcctggcttgattttcttccaagcattcgagaaacagatggtgctccgggacagcaggtgggtgcacacgggggaggtggcggccaccatgagctccatgcatgctgaacacacttcttgaacacctgtgcagctcaaggcgctgtcctaggctgcgggaaaacagaaagaacaaagccaggcccgctcctcacacctgtgggcccacatgccatctgtctcaatgttttaaagggtttagaaggtatccatgaaactaacaagcaaaatcacattcccctcctaccttggcatatacacctcccggactccatggaatgcccgggccaatttggaattatcagactccttggagtgtggtgccaaaagtggcagcaaggaaggagctggcctgggcctgtggctcttcccacctccgtctcttcccacctccggctttgcccagtgccccagggggcctgcgtgtaggcatttggatgccccaggcttcacctaagcccccaacaaacagtatcccttgggcctcgggacaggtccacctggtgaaaatgcaggagaggcctaagcagaccagagagggggctcaaggcactttgtgaggagtttcagggtcctggtgcccagaggtgtctggaggggcgagcacatggcccccagccctgtagactcctccccctgtggtgggggcacagtcaaatgggctgaagtgccagcaagcggacacgtgcacacatgtatatgcttgcatacacatgagcacacatgcatacccacgtgtatatgcacatgcatgcaatgcacgtgtgcacacacacacattcgttcacatacttgcaaacataggcagcacatgcactgagacaggcctctggccaccgacatgtttggatgcaaaccctccgcagccacagccgacatcagcagataaaaccaccaagccccggagccccactcacggatgccaggtgttgcatgcatcactccctccccacttcatttccccagtctcaggtggaggctctcctgcagtggtgacaccagctgggcctctgaaggtgcctctcccaccctctgccctccgtgcctcctgtcctctccacgcttcctgcttccctctttcctgtcactgccttatcctaggcggggggcatgaggcggctcaagtccctgggccgggcctcctgggatggccaggcaggaggctggtcaccactgcagccagaggtgccctgctggaggcctgggtgccaggggacggtggcacaccatctcagtggccccgcagggtcggcacaggccatgcagcagtgctgtacccctcagtggggctcaccttggcagtgagctgggccttctgcaggcatgtggtccagcattccccaggcccttccagctgaggccatcaccgctggtccccaaagggcagctctgggggccatgttcaggcctagtcctctgtaggggaggggacgtgagctctggaggcttcc

SEQ ID NO: 99 - DNA, 234706 bp, Homo sapiens
  source 1..234706: mol_type = genomic DNA
ttttaatcattgctacagagtgtacgcctacttataaaaaaagttaactgtaaaacagccggaggcatgtccttcaggaagtatttcagaaggcactatcacaggagatgacagctccatgtgtgttattgccccctgaagtccttcccgtgggacaagatatggaggtagaagacaatgatattgataaccctgaccctgtgtaggcctaggctaatgtgtgtgtttgcatgttagtttttaatgaaacagtttaaaaattaaaaaaaaaactaaaaatagaaaaaatcttatagaataaagaaaatatttttgtatagctgtgcaatgtgtttgtgtttaaaaataaagtgttattataaaagagtcaatcatgcccctgaaatcccagctacttgggggtaggggactgaagtgggaggataggttgagcctgggaggtggaggctgcagtgagccatgattgtgccactgtactccagcgtaggtgacagagtgagaccctgtctcaaaaaaaaaaaaaaaaagtcaaaaagttaaaaaaattaaagtttataaactaaaaaatttacagtaagccaaggttaatttattattaaagaaaaaatttaaaataaatttagtgtgacctaagtgtacagtaaagtctacagtagtgtaatgtcctaggccttcacattcactcaccactcactgacttatcctgagaaacttccagtcctgaaagctccattcagtgtaagtgccctttgcaggtgtaccattttttatcttttataccatattttgactgtaccttttctatgtttagatacacaaatacttaacaatgtgttacaattgcctacggtattcaatactatacaggtttgtagcctaggaggcttaggctacaccatctagtctaggtgtgtatttgtgtaagtacactctatgatgttctcacaacgatgaaatcccctaacaatgcatctctcagactgtatctcagtcattaagcaacgcatgattgttgaatgagttcttttttttttttgagatggagtcttgctctgttgcttaggcaggagtgcagtggcgccatcttaggtcactgcaacctccacttcccaggttcaagtgattctcctgcctcagtctcctgagtagctgggattacaggcgcgtgccaccatgcccggctagttttcatgtatttttagtagacacagggtttcaccacgttggccagcctggtcttgaactcctgacctctggtgatctgcctgcctcggcctcccaaagtactgggattaaaggcatgagccaccgtgcccggccaattgttgaatgagttctaagctcacttagctgttatttactttttaaacactagaagcctgaaaaggaatctcttaaagtaaaactttaaaacacattctttctaccacatggccaggttgcaaataagaagcaccaaaaaaaaaaaaaaaaaaaaaaaaagaaagaaaaaaaacacattctgctaaaacttggaatttaatgaattttactcactacagttatactcattttacattaaagtaaaaaagaaaatagccaggagagtaattcatctccagaaagcagtttaaagttattgtttttattatttttatttgctaccaatatttttattgtaagaaatacaaaaggtattacaaatatacaaactatttgctctttttgcctcattcaatttagctttcacataagtgaacacattggacagtgatatttcaacaccaattttgaaaaaaacaatgaacttcatcatctgacaataaatacctacattttcattctagcacccagtaagacatccagtttccaaaggattattggtatgcaaccctctgaattttctgacatgttacctttgccactgcaacagaaacaccactgcagttctccctttcccaataagtcagagtaaggggcaggtaagaatggctatctgacttcagaaaccctgggtcacaaagcatcccttacttgagctacttttaaaaccagatttttaatgatagggtacttaaagttttggtggtccttgaatgacatattttacgttacatatttaccctacttttctattctcctcctcagataggaagggtatagataaactggctatattttcatctgcctcttgggaaaggagcaagagcattcagctcagagcattctgaagacagtagccttagagataagctttctttctttcttcttcttttgcttcaagagggctttctgtgtgtaatggagggatggttgctagagtgagacagcccttcccctcttgctatgtctataccatacctgaggccatttttcttagagggcaaaaacgttagaataggtaggaaggttcttgctttcagagagctgtgctgcacccacagggtggacccgacaggccactgtggtaactctcaatctgtgtacagagaaaagagaagcaacatctgatacaaagtcacctgccaacattcttataagactgtgtcccaggcagtgaatttccacactgcttcttgggtctgcagaactcaaagcaccaaaacagagcattctgtagcaatataagcaaacggaataagaataattatgcacctttaaggaacatgcacccttataagtctgtaccctgatatgaaaatagcagaatgaatttcaagtatgaagaaatacagtaaaagtgtggcctgtagatggagagaaaacagcagcctggaatgtggtttatattcttgattagtttttctcttggtaccacagccaaaactgaatgctctgtacaatgacttggtttaaaaatcaagatgcatacaaagatgctagaggcatttctaatgggtgccatgagcacagtctgtgcccagcatcaggaaccatctctagatgaatgtggctaggtcaagttgggagtggtggccaggcctagacaggcacacctgtggtccatgatgtggaggaagatggagagcaccatgtggacaagccaggatggtagcagggaacactttagtggtagaaaggaagagatacaggggacagagatgtagaggtgtggggatgttggtcatcttgggctggttcacacagcctagatgagtatctgatatacacaatttctacatttctagaaccatgatttcaaacacagaaactaacaagtcaaatttccaaattagattttttttttttactttcaaaacattttctattataagtcagaaggaaaaaagcttactgtatgtgacagtcttcctgaaacctaagagaaagttttaaccaggccctatggcaatgcagaaacactaatacattttacagtgaaaacctactttaacacatctcaaaatgataatcgtataaaactttctagttctaatttgcactctacgtgaaccaatatttttcttttcttaacacatactgctcttctataccaaacacttgccctttaaccttcagataaaaacctcaaataccaaaaaatgcaacaagcttttgaggtgttgggaattgttggttgttaaaatcccttttattttataataaattatacaggcaatccttgctttttattaccacactggattgcttctgtacacagctaagttgcctgaagcatggaaacttggacttctccatctgacacgttctggaagcctcaaggcacaagctgacagttctgcttctacagaaaaactctcacactgctctcctctcaacagtactgcctgttcccactactccacatgacacctacgagggcactacatcacgtgagggaagcttcttcatgagggcagacaagaggaggcaccacccaggcactggtctctgcctggcatctattccgagggccacctggcacagtttctaaattaaggcatatctaaaatgcttttctacctttagtttttatttttgctatatttttgcactctactatatgcatatttaataaaaacaactacaaagtcctttactttaattcctttacataatgataaaacacctagatacccaaaatactacatctatatattcaaatctactaatcatgttacaaatgcatgcagcttatttgggggcttagtctaatttttattttcttaggtccatcaataccatgataatgaacattagatgcaaaatcctaacactttctgccttcagttgtactttcacaggactagtgtgattcagaaataaataacatacatgaataataatagaaataatttatgcaaatgtagaacaacttgaaaaaaaatcccccgcctgtcaggtgctgttcctgggggtagctgatgctataaattccatgtactaactaatatatttactacaggtaataggaaaacaaatgaataaaaagtgaggaactatgatatacatgtgtatatttttgcaaacacaggatcagaatgaaaagatatatcatgcactgtgaggtttaagaaatgtattactgctgggatttgttttattattcagactttaagatcaaactgagagttgttggtgatcacagaaatattgctagctgatacatattattgcatttcataaaacttaagattagaaactttcaagtaagggtacaacgggtatcttcagaactttaacctaagcacatcaacggaatttttctagggaccacagagagttagaaattaaataattgtgtggctctatgtgtgctgattagtgctacagtcatagttcttggcagtcaatatgtagttatatgccccctttgagaaaaacctacatttgacaatccaaactcctaaaattgagaaagggttatttgtgtgaccaaacaactcacacggaagattcctctcaacatgaaaatcccctgctacatgagataatttgtttacatacctttaattacctaacaaagaaaaagagagaaaagaaactggaagctaaagaattgagagcttttgccaactgaagacgaagcagaaaataaacttttcaaaacaaaacttttccaggcatatctttcaccatcacatatatagaatgatggaaaataaaaaaataaaaaaaaattcctgcaattatacatcttttctttaaaaaaacaaaaacaaaaacaaaaactgagcttagcgcctgagagatgcggggtagacagcttcacacagggcagctgctaccgcatctctttttacccgaactttcggagaattgtgttgtacttatttatgcacagaagacacccgtttgctactagggacatttttcttcctaagatttgcagaacagatgcctctgagacagcagcagggcactctgacctcggaaagcagcccgcggggccgcacataatttcaggcaccggcaggtgagtgggaggcggggccccagcccggcctcgcccactgcctctctcctgccaaaggggcggggcaacgaggcagcgcgcccggaaggctttcaagtgggaatcaagttttgagcacgagcaaatggggttcagactggccactgttataacaaaccctggggtggaattcggcctttcgcataggggctttaactggactctagttcctgggagcagaggggcgaatgaggcgggggatttctcagccagtttctgactgcccctagtgtatgtggcattttggttcagtatgaattactgagactcatctgcttgccactcaggaggaaagttgggcaggcaccgtcgagtgtctgccactcaaaaggaataagctgctttctgtggtgctgtgctaaggaaactgaaaaatactgcaatatccttccctactaaatttcaagtgacactgctgtgagaaaggtgacctctaaaattaacttaatcatttggggtataagaagtctttaagtagacttgtaaatttaaaaaaagtatataaagttgccaaaaaacttcaaaagttaagtatgtagacacactcctaagttgttatgctcatatacttcagactttttttttttaattagagcttcttatgaatttacatttgtgattccacaaatgttaaaattacctggtcttttggtattttagggctctgtttcaatacagcaatttttcagacaaaagttttgtctactgaattactgatgtgctactcattttgctcacctgatctttaaattaggattttaaaatttaatcaatgttgaaaggccaccatgctagggaatttgaaagcagcagagagggtatgtgtgttttaactggggccactaaaggagttttatacttctaacgaaactatcctgttcacagatgaggactgcctttttagtaactaagcctgttttaatctagaaaagtaaggtaactgggtacttcaaaaattttttcttgactgaatgaatgactaggctttctttacttaaatgatcaaaatgggtgtattatccatccttaagaacaatttatttgcagacaattgttcagaacctaggtaacaagtaaaatattgaagttacagaacattatagagactattaatcatcccaaaaaacaagtgctaggaaagagttaaatatgcgcagaaaaataaagttagaatgaaatctcttttagaagtacctctttagtcttcatcagatttgtttttctctaaaagtgccaccttgtggaatataccggaataaaacaagaaagctcatctcttaggacagtgtgaatgtttagaaagacttttgcaagaaaagtcaccttcctttcctaccacatcaacttcaaattgctgtaacagtatttcagcagatgctcgaaaagagcctgtatttattttcaggtggctcttgttttcttcctaaggctagacaaggtaacaatatgttgaaggaagtccacttctactcatttagctaaacgttatcacttcctggaaatgctgagaaatagaaaacattttgaaaagctgattggcacttcattaagaaaataaaaatccccagaaaggctacttgagaaaaaaacgtgtaaaaattggaccccttctgtttttacatttctgttgcttacaaaggtcagaagatagagagaccaaaggattatttttggtttattttctgaaaaagtacaagatagaaatgcttgagatatagggatgtattaaaattgggttgtgaattgcattgatatagaaagggagtaaataagaaatgaaaatgctagtttctcatgcttttgaggaaaacagcatttctaattactctaaggacttacatttcttggcacactttggtagcctcaataagtttttccactgtggagatggaacatgtaaatatcttcctaattatatacccaaatatacttaatggacatgataaatggttttgggtaaggttcacaatttttcaaaagtattggtggcataggaaacacatgccttttaaaaatttattttttcaatgaacgttcttaggcatgtgtaagaagtattgcttcatgtggttgcctcttcccttgaaatgggaaaaaagtacaggtaatttagtttgcttgggacagcttctccataacatttgttttcgaccatattaatcccacagttaccagatgaccttagtataaatttttacaatatatttgttcataaagaatatatccttcaaaatatatatagctttgaaactaccctttaaataccttcattttctccagaatttcctttatctattgcccactgttttatgaataatttttaaagccttagaaatcatacatctttatctgtcacaatgtgaaacatgcattcttttgaattatataaatatctaagagtttataataacattccaatattttctttccagggtaaatattctgtagtttctatactaacataattaagtaattatggtggcatattcacttttaacattattttttcctagactcaactatgcaattaaagcctgcttttggaaaatgtaagacactctcatgtgcttatcataagaatagtcaaattgtcacttaaaagaaaagcaatattttagaagaattttaatatgtttatgatattaggaagcttacataatttaatttccacaatggaacaataatggccattactgactttaataggcaccacttgtaaaagaagcagctacagtttcttaaacactcactttaaatacataatttaaagttcaaaatgtttggtactatttaagagttttctcatcaagatggatagtacattctggagagtcaaactatacatttctctatagaaaagaaacatgctttatttaagataggaacatctcatgccttctaaagctttcatttttatttaacacaatgctgagattctattcttaggtgaataattttcaactatttttagtaagtcacctggggctaaatgaaaagtctgccattcacagtgtgtgcttcctgagagaaaatcatgagaatacagggggctgaaatggccccaagctttcttccaaaacaggttctttgcaccttgagttcccatccacttcaaaggagggacaaagtgggaggctccaacccactgggttcttacaagtgcttagaaattgtatttttaagattaggtcctttttattaccctttgccatgggatttcttatgaaagctaaatggacaagtttctctttttctctttttatatgtaggttgttttgactccaccctgtgcaacagttcccaaaatgcctgagccgccagaaccaaacatcaaacagaaactagcagggacattcttgtactggtcctactatgaaattcaaacatgatttcaaatctgtcacaatattttaacttgctatgagctgcttcagtgtaaccttggggcaatatgcccttttcagttcaccactgcttagcttttggcaaagatgtttgaaaccatatgttacagaagaataagctgtagtcactaagttcttactctactatctgcttcaaaatgccctaacggcaagactgcttgtgttggatctggatttcagaaatggcgaatctggacataaaatacataaatcaagagagtattcactcaaatgcaacaactacaccgatggaagaactggggacagatttttacaaagttcagagaggctgagatgccctttcattctgtgtcatcagaagataatctgccaacgattgaatgccagaatgtttgtgctttaatttttcttcataagcactgcctagaaatgagtcaaaagcagatgctaggaataaaagttgagctctctactcatttaaaattctaaagaatgctgaaaaattccagttcagaacagctgcatttttcttgagtgaacttatgaaaacacttttacaacagcaaaaactaaagctatgttcactctagccatgaatactaaccaaaaagctcagatgaatcagtgcagtgagtttttaaattcaatttgtaggccctagcaaaaatgtctttgtattttgaccctcgatcaaaggaaaggcagaactcacttttccatgtgagactttgagtagacctgaccttgaatgctgtggattcattatatctcaagcatttatagtactgacaacacctaatcaatgttgtcacaacgaaagtagaaaacatttgtatggcccatctcctttattatcttgctctagaaaacaatgttcctgttcctcaagctactgaattagaacaatgttaagtagtacagcaattaaaaaagaatagttcccaaccccaaaagctcttcaggagaaacatctcctagttttttctcttgttcaagatagtcatatatcacattaagctgcaaagaattcagtacaacttaataatgcataaacatgatctgaattattttctgagtgcagcaacctccattctttgaaaatcctaaccctaaacataatctaactgttgcatgatctaactgttgcatgcactctgagtcagaaagcacaggtggctaaactttccaaaagatactttctgtgtcctctggttactagagccaactgagcactaaaccacttataaggcagagatggtatgaaatataaaggactgtagagaaaacagtaagagaaaaaggaaaagctgtttacaatgcccaggccaggctggctctgtagagagcaggagtgagcacaaggcactagaaataagcacagcctgggggatggagaaaagatcatttgatagagtaaatgtatggccctaaaacatagctaaagacataccctcaggtaaagacactgaaaatatcttctataaaaatgtaattcacaaagtaacagtttatagcaatctgtgtgctggtgataaaacaaaacaagatcctactcattatttaggtaacaaaagtaaacaccaggtagaaggactgcattagagaacatatgtgaccctgttaggtttgcagaatcgaggccataaaccataagctgagactgcgaatttatgaaaggttcattgaaagcaagcaaacaggtggtgcatgggaacagcttaagcaatctgttattagttatacaatggtagcaatatatttcagaagtgccgggagatagacaagatggatactttgccaacaaggcagtgtgtggcagaaagtacagtgtaatagatgaggaaaatttcaaggccactcctgtctctagttagagagaactactctccaaaccaaaacaggaaagagtttctgacaaattcctaaaaacaaaaacaaaataacaacaacaaacaacaataacaacaacaaaaaaagggaagaaaggaatttcaaaccaggaaataaaggctttctattcttttttttaaaatctatctgaggtacactccctaaacctatagcaagtaataaaaagcttacaggctattttccaaaagaaatgataaagcatgatgtcatacagaaggttaaaatagacttacaacaagtaaattcagcattctgaagactaaatagaatgcatgcacatctcttaaaatatactagaattttttctcctttttgctgtgtgtataaaacttcatcttttactgctagcaaatttactgcttttggccagaaaagaaatgctgaggacatggggttaactttctaatttgagaagactattttggtgaatcaccttcagtgaacaaatgcctgttatttactgaccaccttgagtctttaaaattgaattattcttgtcgtttacaaaaagtaacactttaaaagatcacagaatctctcacatacacacacacacacacacacacacacacacacatgcacacacacactcaaaagtaccaaatcaggcccggcagctgcagagagattacatcataactcagctgtgcctggattacccactccacactggcagcattcaaggttagaaaaatcaaatggcagcacaattggtcagcagcttctcttcttctggaatttttccaggttcttgaaacaaacagacaaacaaacaaacaaatgaacataaagctgcaatcactcttgcattgatttcaaaacagtaaactaggcggtttccttggagaagcagagcctgtccagaagacagcagctggaaggcctccagatagcaatcctccacagctctgtagggcttgctgagggggacccataagccaccaagggtgttctccgcaggatcagcttaaggcggctgctgaggcctcaggctgtattcagctccgaggtgttctggctgggcggcaggtgggaatccaggttttctttgcacctttccaggtcctggaagtatgggtgagacagggcactgtaggcagatattcttttggctgggttaaatgtcaaacacttctgtaataaagaaaaaaataattggttgatatacaatacatcaatgtaaataatgtacttacagagttatccctttattcactgtcatatgttaagcgcatctacagtgggaatgagtatttatttaaagggacactaaataatatggagacagtactcatatatatccctaatgtataaaatgtccctcaggagaagacccttttgggtgcctatggactgtttcctgcccaggatttctcactaagccattaaagtatgcatataactttatttagtaattcttccagtgctagcaaacttagtgctacagtcggagacttcaccgtaacttattatcctgcctcaaggctacaccactcagaggcagggctatcttccttttaattaataccaaggtgccacatggctagcagtagctctctcaggggaccattagattcagttcgagtcactaaactctattccaggctgacagctcaagtgtagggctaccaaggtgaatgagctggtgcctgcgcttaagaagctcctggtcctagtcaagtggtttgggcagtttggctgagctactgaggtagaaggtgaaaggagggaaagggaaacctttgcagtagcagcaatctctattcccaaactgtccatacctaaattagttagaatgtgtccctaatttcagtctcatttccacccctacctcaggtaatcttgttactcaaatcctcctcctctccttccatcaacgcctcctgctgggtgcctagcaggtggcaagcactaattagtgatgagtaagacctcctcattgccacaggagctcacaagtagcagggaagccacactggcttctccatcctaaagtgaactgggtatatgaaatgtctatgcattccagtcttctatgtaatttacagacttcacattatcatggttaatggaagacctcttccacttaagaggtctgcataaccatgatattaataggactcctgctcacagtcctagtcaggttccaactggattagggacctctctaatattctatcgaaggctactgacctagaaaaacaaatacaaacagaaagttctatgtgtaatttcaggcaaattcttgggtcctctgaaatctgatttatcctgagatccccatcagtccatggttgctagcctccctataggatcttctgaacatcaagagctaaagggcaagtggaagaaagagcttgtctgtagaaaggttccaactgtctctaacagcaagaaacatctctagaaaagctttgcaagggctgaattcccaaaggaccggaaagcaggggcaaaattcctgagcctgagttctcttttcccagagcccaagaaggagaaaattaggtagtggcatttaatctccaggacataggaaagaagagaaaagagctgtgggaatacattcacaatacagagacatgtctctagaggattatgtgagaggaagccctttcctcacagctacactgatggcttaaagctgggaagagggtggagagaaggagaacaccttagccaaatgtgggggtgtgggagaatctcacgttggaagtcttaatacattttgtcctatagaaatatggttaaaaaaaaggtgtttaagttctattattgctctacttcaggaacaaggttgccaggttgagggttaattaaaaaactttgtgttaataatattgtttctgcaagaaaatttagtttaattgccaaatagtttacttataaaatgagcttttggaatcacaacttagtcaagagttggatactatggtagattggataacttttagtacatattccctcttttctctcccctctcaccatagggggagcattctttcctccattcaagttggccttaggcatggaacttgctttggccaatggaacatgggcagagtggcgggtacttcttccaagtatggaccttcaggggcattgcatatttctgcttgcccttctggagcatcgataccttctatcatgagaaaaacatgccccagggagctgctgcctctctggcatgggccccagcatgagacacatggagaagacctgtgcttcacccacgggcagaagcagatatcaaaggctgttaattcaggaggtaaagcagacactcattactcactgggtttcagacatcaagaacagcccaacaggtacacttttctacctattgttctggcctccaagtataggaaattatgtatatggttgagcattaagagtctcagagcacagaagtccttattttcagtgaggtattttatatgtccctggcacactaaatacttattaaataaatcagcaactagaagaagtattgctatatagttcttttggaaaaacatctccccaaagttgtgaatgtttaagaaaaggcacgttaaaatgacaaacaaattacttaaagtagcatgaaactgtaagaaaggaaacataatatttacttctaaagaaacatatgtcaaagtgaatcgagaggcttctaaacctgcattgaaataaacattcaaagatggcagatttaaaaaaatgtggatcagaaagacattccagaatcaaaagccaccagctgctacaagtgtgaaaatgaaacctctggagggactgttgcctcctgctccatgtggctgtggcatgtgatgcctatagcagctactgaactgatatttgtgcccaccacccagtctgggtagagcaggtgtctcactggcacagtgcagacgagcttgacatcagaaaaacttaccagaagtaggtctttgcctagttcatcgatatctgttacaaacttctcaattggttgggcagattttgaatgaaaagcctgcctgggaagggcaacatctctaggccagtcttcttctcctgggagtccaatcacgctacaaaagaaccacacatggacataagcattagctactatgcagaagctgttttctcatcaatttccagagaaaggcaaaatctaagggggagacatggggggcagagtcccaggagaccttcactttatcactggcagggtctctgtttatctctgtcctactgcaatatggtggccatgggggagagggtaatctcacagaagaattgtaaaattcagtgggaggagataagagattgctctggtagcagacactaaatgtaagggatgatgtagaaatagaaaatatattaccaggcagtaagctctgacttagtgacaaagcaggacttattgtattcagaggagacccatactggtacatatcttcctttatgtccaagaatgctttttgtgttttgatcgaacaccccagtattgacatgattttatgatgctcatccaacatggtttattaacatatcaatttggttgcatttttggttaaagagcaattccctacatattaaatatatacattagaatcagaaggaaaaatgaggctaaaacgtgctagtcctgcattatacaaacatgattttataaaaggaagtctgtggtattccaaagtgagcaaacagtaaattaaaagactattatttatatttcccctgaaaaccattctgggatcagaaatgtggaaagaacagcaagtgataagcacaggcttcggaaataggcagatttgggttcaaatcctgcacctgccacttactggcaggtaaggacaaattacttaacatctatgacccttagtgtctttatgtatacaatgataataacttacagttgtaatgaggatcagttatactttatttgaatttatagtaatatataaatttataatttaaagtacaaagcacagcacctgatatacatcacacacagtcaattatcaatcaatacactgcctactattattataattagaaaatgttattaatacaagatgcataggaaatacatcactaccacacttaaaatatgaactgcttgtatctatgtataacttaagattctttaaaaaattaatgggtcaatggacttacataacttatacattgtatagatattatttatagtttacatataggtcgtaagtaggtttgaacagagaaaatcagaggatgcagggacttctttctcacacagactgtataactctgaaccaaaaataaaatcatagtttagtggacggggtacatagctattcaaatactggaacaaataattttaactacagttagaaattgtgctggcccacattagggtcttctgcttggcctctacttgttgggactaaggcccaggaagaggtgttcttatgaatgtacttccagatttcaggaagatgtggtacaggtctcaagatctgtagcacttcatttccccttccctcacctacacggagcccaggccatagacttcagctgggaagataaccctgtcatcatggcttctctgcctgggtgtctggggaagacactgtaattcggcctctatcaggcatactgagagagctacattattgaggcaaagacagattcatggacatatttactagaagcaataaatagaaatgacaatgagcaatatatagatttgttcaatagtacagcctacaatagaagtaaaaagaaaaaaaccaaaaataccactattaattatgaaaagaaatgcacgtgtaagtgtctggatacaatgggacagggcagaggagggaatgaaaaatgcttgttagagagctttaaaaatttcctttcattcctttttagttgtcaggtctatgtgtatcaatatttttgtgtatattcaccagtcagctagaaattgattatattaataactcctagaaatatttaaaatcttttttatttgtggctttgaatgtatctacatctaattacatcttgcaagtatatgatcaactgaatgccaaaagccttcagaggaacagcacatctctgtttgtatgtgtgtacatatacaaataactttatataattttatataaaattttaaacaaacacataactatatatataaaactttaagtctatcacctcctctgattcctgtaataatttcctaagacatgtaagtcaggtgttattagtctcattttatagatggggaaattgagaatgaggaataaaatgaactgccaaagtcacagatagcaagctcagtcacagagtccagagtgagttccgttctctctattccaatattttatttccatttagctatgacatcattcttaaaaatgctctaagatgtcacaggctaaaactattgtttcacttttaatacttgctattacttgaaggcttaaatcttcctaaacacagaaatgtttttccctttaagagtatgtgaacatggaccaggtggggtggctgtaatcccagcagtttggaaggccgaggcaagtggaccacttgaccccaggagttcaagaccagcctgggcaacatggtgaaactccatctctataaaaaatataaaaattagctggttgtggtgccctgtgcctgtagtcccagctacttgggaggcttagataggaggattacttgagctcggaaggccaaggcttcagtgagccaagatcgcaccactgtactccagcctggacaacagggcaagaccttgtctccaaagaaaaaaataaaaaagagtatgtgaatatggctttccttaaaaaaaatttggtttcatgtccagaatgaacttttatggcccaaatatgtgttgtgaaattctgataggtccattaaaaatgcttgcacttaattccactatttggactgctgaatataagccttaaaagttgacatttatattggcaagcccaacagggcacaaaatctataaatggcagtgatggaggagacagaaatattttttcaagtacttcagcagtgacgctagggtgcagcattgtcccttttctctggcaaggtaatgcattcagaggaaacagaacataattttgatgacacaatgccagaaaccacaaagtaaaatctaaaggcacaaaccatagaactctacagcttctttgctgttggcaacctacgattgtcaggactttgccaaaagcagaactggcttttctttggaagcaggtcaaacatgccggtcaaatgttccttctggtccatttcactggcctcatgtactaagggggcactaacaatgttaacaagattgcagacatcagtgctggaggtagacacaactgtcaggtagtataaataagggaaagaaggtgatggctttcaagtcctggcaagctgactttagtcaagattctctttccttttaacagaaggtcatcagtatgtctgctttccctagtttcctctttatgatcacatgcacacaaaatatattcaacagtcatggggaaaaatagatgggagttcatcgagtgattaaataacttgccattcagaagcaggggtaacatgaaggctttgtgttgaatttatccactgtacagagtggtcagtagtaggagcagtagcatcacctgccctggacccaggaagcccccaggcataaaaaactagcaaatgttattcaggccttaaagctactatgttctgactcagcagtagcactggcattaacagaagtctagctgcttctagtcactaaaagaacaaaatcaggttccagttttattaactgttttaagcagtcacgcttgagtagacagtgctgatatgaaaatctgttctttaggggtggtttttttttttttttcagtcttacagacttcgaatttcataaaaatcactgggattcctataaaatgtcacagaccaaagatcagggctatttttggtctagaactcccacttttttcctactccactccaatttggatgggcctttcaaacacaaaaaaccaaaaaaggatgccacactgcatgctttgtcagaagaagtgccccagttacattctagaaacatgaatgcatacatgcatgaacatgcagacatgaatgaaactatgtaaatcatcaaggagcgatgtaactgaaaccaaagaatttgagcacaagaaaggatcttatagagaatttaagtcagagtttcatttctcagatgaagttaaggaaataaaaggttaaataattaatgatgaactctaatagtaacagtaatagataactttttaaagtgcttactatgtgccaggcactgtgtaagcccttcacgaggtgttttaaatgactttctcaaagttgcagagttattttgccaaagacttagggttctcattttctattttggtgctccaaagaaaaatgagatgtgtagcataccatccttcgcccaggaaaacaaaacaaaacaacgcagaaccaacctgggtgaccaaggatactcagtggggacaggaagctcactggacaaggatgggtacttggtcaccaggcatcccatctctgatggtgggtgcttttgaaatgaccacaagcagaaaatgtatttgaactaaaagaactggagctcagccacacgaagaaagaggagcagcaaaaagatccacacaagcaacatacaagcttccagagcagagcagttagggctctgcataaaacggcacttctaccatgtctccactcaccacacaaatagtaacactgtctgcagcagctgcttgaagtaagaaagacaagagataaacacatgatatgcatgtcagaggaaagtcactgtaaatgttttaatgctatggacactggtgtaaaattataattattacttactccaagatttttcctagttgatcaacatctgaacttccacgaaaaagaggcctaaaagaataaagatacattttaaataagaaatgttctcagattacatttcaatcatatttgccattatcattgtttcacaggaagcaaaatattctttatgggttgggaagaagtaaaaaaaattgagacatttttcctttggtaagtgaaggttttccctgcatttcatgtatgggttaggatctctcatgaatacctggtggtagatgaattccatgttttacaatcacgggcattctgtttgcagtcattcttacaacagtgctaccgtcaaattcagttccaggtttcaaagatctgcttaacttcgtgataaggtggaacataccaccatcctagtctcgaaccataaataggtgagattctttgatatttctcagagcactttttccatactactctgctatcagagtacttcctcatgggtctctctcctttcatttgtcctcaatgctgcagtgaaccacctctgggtctatttttctaattataccacttttcttcctcccaatattatggcagctaaccattacaagttctaaatcttaactctgggctttagaggcaattgtgtctgcttcaaacacacagccttccttgtctacattgagcatttaactggcaattaaaaaaggtcattttgtgacatttctggcatttctccaagaagatcaagtagccccttgagggaggagacttctctaggtttccctataaatccctgccatagagctttactctgacagatgcagttactaaacattttatttcattttgcatacacctatggtacacaagtaaacgttccctgattccttcctcaacaaatgccataaacaggtaattttcaacattaatgtactaaaatagttgtagtctattatcaggtatcatatctctttttatattatatatcaaattatacagccttaaacttgacctcttaaatattttctgtgcacaataaatgaactcactatatatggccatatatggagaatcctgcagtcatagcatttcagtggttagaacacaccttaacgtttctcaaccatactttctatgaatgttactattcctgaaaataatgatttccaaatgcagtggaaaagaatttacttattgcaaggtgatgggctgaatttttttcccccaaattcatgttgaagcccaactcccaagatctccgaatttaactgtatttggagatagagcctttaaacaagtaattaaaataagatagggtgggccctaatcaaatctgactgttttccttgtaagaagaagccatttggacacaaagagacatcaggggtgcacatgcacacagagaaataaacatgtgagaaccatgagaaggtaagcctaaaagagagccctcagaagaaaccaaacctgctgacaccttcatcttggacttccagcctccagaactgtgagaaaataagcttttgttggttaagcaatccagtctggtattttgttgcagcagtcctataaaactaatataagccacctgcatatcactaatgcagccaaattcataaagaatcacgaagttgcgctctgaaagacatcttgacaggtcttaaaagatgacaaggtgagaagtccaagtttttttctaaaacttccaaaaaaaggcaaaaaatggaatcttaacaattataatttattgagcatgaatgttgtatctggcctagtgccaagtgccccaaacataatctcatttgattctcacaaaaattccaggagaaatgtagtagtacaattatccctattttcagatgaggaaactgagtactggagatgttacatggcttaattaagggcataatattcccctctccttttatttctttttagttaacatgctgatttttcaagatttttttttgactggggaaagggtctgtttggcgatggactgtcctgggagtgaatctctatttagctgtttcttcctatatgatcttaggaaagtctcttaatttctttgacttagttgcttcatttgtaaaatggaaagaatgatacttacctcataggatcaactaagtgagattatgaatatatctcatctactagaatgcccagcttatagcagagttacaattaagtggtaactaaacacacacacacacacacacacacacacacacacacacacctctcttattcctggccaatattatacagataatcatgtaaagtatttcacacagtgaagtagaaaggaaggaaccatttgccaccatgtggtgaggtccaagtcacatttaagtctaacagtctttcctctggggtcactaaatattgcttacatgttacagctcttacaactttatcaagaaaagaattttctaaaggatgaatgccacatttttcaataaggattaattaattctgaattggcaatatcacttcctgtatgcagttttgcaaaaaaaaacaaaacaaaacaaaacaaaacaaaaaaaaccaaaaacctcaccaagtatttaagtctatcagtgagataaattttctcaggtcaaattaccaaggggactaagtttcagattatatgcctttttaaaaaaacaactcaaaaatgcatagatatcatttgtaatctcagtaacagtggcaaacaacatttagaagttgggtatgttttttaacagatgagaagtgtatactggtatgtctgttatagaaaggaaatgattcatgcataacaggggatgaaagtttcatttagttacaataatttcattgtactcaaaagacaaggaagtcatgggttaacctatagaacacctttgtaacctgtatttgacctgcagctatgctttgacagctatttttcttgattagtggaagaattttccatgttcataaagtgatctttcaaaaaaatattactggagaatatctattattttatactcattaccacattctattctagagttgttatcagttaagttaaaattgttaacttatcaccttacaattaccacctattcaaataactggatgaagcagaaaatcaattaactgatctacttagtacacactaattgactgattacccagtaagtacatgcggctgtaattggtgctgggaaatactaaaaaatacacatataaaaaatataaattacatttcaaagtatataattataatgtatgtaatatacatataatgtaagtcatatgatatacatataatatgtatttatacattaatagcaggagacaaggagacaagatatacaaatgcagaatcaccgaatagaagtttacctcattttaccagtgggagacagaagtcgcggtaatcgtttcatcttaatagaatgttaggaagtggtttgattaacttacttttacagatgggaagtaaagtaacatctaaggaaacacagatgagtaagtggctaagctgatttgtctgacttcaatgaacagcaatatagaaaaagtgttttagaaagactaatttggcaggggtttactgagtcaataagaagggatggaaaccaagccaaggaggtcaactgggaagtcagtgtacaagtaagatgacaagggcctcaactaggtgggacaaggaaatggctagagatgcaaagacatttagaagaagatgatcagaacttgatggaaatgtgaacatgacttgagaggagaagcatgattttaagtttgtattatattattagtaaagtctggcagaatgagatagatggaggtggtggggagaggagattagaaggtaactgatttagttttaaatattttccttgtataataaaattatataaaacatttcactgaaattggagaatgaataatatgcaaaaaaggtagtttggcatacctatgtatatacccaaaagcattaacatacaggtccacataaaaacttgtacatgaatatttatagcagcattattcataatagccaaaaagtggaaacaatcctaacgtccatcaactgataaatggataaacagaatgtggtatggacttacaatggaatatcactgagtcataaaaagaatgatatactgagactacctggaggacccttgaaaccattatgctcagtaaaagaagccagtcacaaacaaccacacataatgtgattccatttatatagacaatgtaaatttatacgaacagaaagtagactggtggttgcctgggactaggggatttgagggaactgactgtatacagactgaaggtctgtgcccctgaaaatttcctgtgttgaaatcctaattcctaaggtgatggcattaggaactggggcctttgggaggtaattatgtcataaaaggcattagtgcccttataagagagaccctggaaggctcccttgtccctttcaccatatgaagacacagcaagatgacgatcatcaatgaatgaggaaatgaaccctctccagatactggctctgaccttggacttcccagcctccagaactgtgaggaagaactttttgctgtttataagccaatccagttcatggtattttgttagcagcccaagctgagtaagacagactgctaatgggtatggcgtttctttttggggagataaaaatgttctaaaatcgactgtggtggtagtggtacaactctgtgaatatgctaaactgaaaaaaacactgaattgtactatttatattggtgaattgtgtggttatatcaattatattttgatagagctgttaaaaaaggtggttaagaaattatatttccaagcaaacattacggattcaggaggagggtaaaaaaactgctaaatatttggaaaccatccacatacacacaaaaataaattaaaaaaaaaactgctaggaaaactgttaggtctacatatatgaaaggctttaagcatgcggtattaaagtatagtgacaaacattttaccatatattcaatcaagtacttgtctggagacatgtgctccgcaagttttgataatctattgttatgatctgaatctttccaaacacctgatttatcagattagggttaaataataaaccaaaaatgtctatgcatgcaaaaaaaggcactggtatgaaactattatcttatacttcactttggatggtgagatgatgaatgatttgctttctgcatttttctacttttctatactgcgttttatgagtgttagttttaaaatcagaagaaaaaaaaacccgacaacattgcctcttgccatacactgcacatatatgatctgttcacctcacttcttcattccctactttaatactaaggcaactctattatattcgtttacctgttgatttctacacacaaactggaagttctctgaggacagggccaaccctcacttgattctgtattcagagtactgaatttactgcccagtttggctataattggaactcaattaatacatgctgagtggttattgctcccccctgcaagaaggctttctgtcccttcttttcttcaacttcagctcctcctgtctcaaaattcacttccttggttcatctctgggtaattcaagtgcaagcaggtgtatctgcagaggtacatatatacgattagatgtatacacaccaagagccaactccaaatccaatttatattgttgtatctgtttatgctttaatctgcctgtggcaccagacaatatctgcctgcaaataatgtgtatttaaaaactggggctggctgacaattattctcctatatccaaaaccttgcgaaaaccttcacagaagcagcaagaggcaagcaggataggaactttgccctccagtgcttgcttcagccaggtatgaaggctagggatggtctccctggaagacaaagaaagagaagtgttgagaaaaagtgtagcaaaggcaaaacggtataggattaaggagagtggggaggggaaagacgcacttgaagtaaaaccggtccagaaagggagaagggctggtgggaaagagcacggaaaaaaacaatttaaagcccaagtaatgacaaggaaagaccgtggcagaaagaagaatctgagacgaagttccgtcacagagacccagactgataggaaaaaacctctgccagggaagggaggtgccacttagaggaaagacttgtgtctctaacacaagttagagagtgtgctggcatccctgtccataggagggactatgagtctggtaatttccttaaaaataaatagctgaattaatttttccttgttaccgatgtgaataatttatttatccacagagggctcatatttactggactatgagtaacttcctctagagaaagagatggagagaaagaaagagagggagagcagagggacaaaccctaccatttttcaactcaaaattgaggattaaaattaaactagaactcaccaaactacttcagatttctgaaacattacaaaactcataaattaatatatttactgagtcaactttacatatgactaaaataagactaagcggtcgttgagatgaaaaagtcatttctaatcactatgacaaaaattgaatgggtatctcccatttccaagaaatagttacttctctgaaatattcaaataatttcatttttattctcccagtgtcatctctccctgccttagtctactcaggctgcaataatggagtactgcaaactgggtggcttaaacaacagaaattaattttcttgtggttctgtagggtggaaagcctgagatcagggtgctagcatggtaactcaacaatgtagggttctggtaagatccctcttcctggcttgtacctgccttcttgctatgcactcacgtggctagagagagggtatgctctttggtgtctcttcttataatggcactaatccaatcatgggagccccatcctcatgacctcatttaatcctaataatctcccaaaagccccatctccaaatagcatcacattgggggttagggcttcaatgtaagaattttgggagggacacaaacattcagtcagtaacacgtccttcttcatattaatgaatgtaatatatcttccataattttaaaattaaaaagctgggctggcacattcttgtctactatagcagcaataaatgtgatttgtctttctgtgactaggatccaactcttcattttatatactttttgatattttttcttgccaaattacattatttatttatttatttatttatttatttcccttccaaagcctcccttatctcttgctctccaatcacactgttcagggggattcttaaggctgggaaagaaatgatgatgtatttagcactttccaagggctgggttcctaatgcattattgcattttaattctcactctaaccatgaagttaggcgactagcaagtactgaaaaactttgcaaatgaaagaaagttttagaaccaggaaaataaatctgagtcaaacttcggaagctataattcacaagggtgaagactttatattagtattattaaaaaattggaggcaagtcaaggatatggtacccccatggaatcactcctgtcactatgggcttctttaatagtcagatatcgcaggctcaacactccggggaatactgtcttctgtctcttcatataaccacagagcttggataacccttctgctcccttgtggaaattctagctttaatactcactatagtttaaattgggcttagcattgaaaaactttaatgacaacatgctggaaggtcatttggagcaagggtgatggtgtggtgtggagacagaatagatgattagagacgatcagggacacctggcaaaatgagtgccactgattaattagtgaggctctgattattaactgggctcagggcttatcaattgccttcactctgcagcagaactctgaactagagatatcactcgaccaaattagaacctcaccataccacataataaacttattctgtctcacaactcccagtcttgctttatactgtgccttcctgggagagaaggaaaagctttaccagggaattcgttcatgagtaggaaccttagcactgttgttcttcaatacctggtcatttgggtaggagagggcccaggaatagggtaaccaacgagcccagtttgcccaagattgtcccagtgtcagtactgaaaatgctgtgtcctgggaaacctctctgtcccaggcaaactgggatggttggtcaccctatccaggagactcagagcaagaggctgtagaagacagaattttttaaaaaaattaagttctttgttatttcagtggggcaggctgtttaaaaaaatcaaatgagcatacctcaaaacaatcagaatgaaagtggtccagacagacaggttttattctcttttttcctaataactcactgctactgtgtaataagggactagactggggggagtcccctcctcataccacaattcaagatgttatttctctctttcagtaaatgacttcgtaaaactatacgcaccttgcctcttttgcagggaaagagcattgcctatggttaggtctacatggttaaattaatagtctgcaggaagtgctggatctaaggaggcaaccacaactagggggtcactggggtggagctacctacacatataggatgacaaggagatttcatccagtctggttggtagcgataggctgtaagctgggttgagaatgattctgaagtgctgtgtaggtggagcaagagagagtgctacattaatcagtaacacacacctctgaaaatgaactagctaagtgagtcaagttttctctcatgataggctgacttcaaagcaacattgatacaaggaataaaaattagaaaatacaaaagtaagtctgtctaatagagacatttcaacagcaaatactacatacattacggtaactaaaatgtggctctcaaaactacttcttacttttaacctctgaatccactggttttgtcttcaatacaacattttttgccaaagggagtcttatgggctctgttgtgggtgtgtctttgagtatataattatcatcacctctatgctcacacacctttctcttgcaaaaactctaatattgacatcagccggatgtcagcaaaatgacatctttctgaggctgaaggttttcatgttgcctttgggggaaaataatcactagacattttctgaaatggaagtgtctgttggctgaagtggcttctttaaaaagaaaaaaagaagctttgctcaaaatggaaccaaaagtatcagtcataaagcattacaaatgatctaaaaatattctcaaattggattcaatcattggttaaaaatagtccaaacactgaaagactgattttctcattttttccttaaaaaattataatgtgctcaacatataaataagggctctggcccttgaatgtcagtgatgttgtctaccagtgtctagtattgtgagtttagtgtggtgattaatcaacaaaagctagcatttattttatcagaataaaattttactggcccaacagcaagtttaactttttcaaaaagcttatttactgaatttatattttgaatgattcatcatgggtactgttaaaaataacaaattattgcatacctatatcaaaacatctcatgtaccccatatatatctactatgtatccacaaaaattaaaaataaaaaatttaaaaagtaacagattatcttgattataaaatatatacgcattgtggaaaatttggaaaatagagtaaatagatgaaaataaattacacagcatcacttccattcttttctctttttatatacaaatggatatgatggtatctctaaagatctttttttttttttttttttttttccaaacaagctaagatggcaccaatcccagggcaggatctgagtcttgactatagtccttagttttgaacaagtacagggtgacaagaaagtgcataacaaagctatgactgaataaaactcaaatcttggtgaagaaaagaaatcaaggacacattaaaaaaactatgggtacacacattttcacttcttagtttatatcttatggcagggagcaggagtaatcttttctttttcctttatgaatggtaaagacaactggtatcctgtctgaatataatatgcctatccagcacactttgggtagaatccaatgatgtgtgataactcaacaatttggtacaggaaacagagcccacaacattcctcagaaatttcacagacaatctagacagaacagacctatttgaatagggttttttgttcagtaatatttgaaggatgcaatttttcacggtggacacattgggtttgtgacagatgcaaattcagatatgaataaaacacaattaaatgattcagactcttgaactgtgcttccacagacctgatttctgcatgggccaaacaaaggaaagttggtgtttgacaactgtggatgactcatcagaggaagttcttaccatgtggatgtgcttgttgaaataaagctggttaacaaagctagccttttttttttttttttccctctgtgggccagcgagggtttcattttaggaaatggaagtgtcaatgtggacaaactgttctgaagtatttatagcataatgtaatgtgttagtttccttaaactgcctttggacaaagaatatgtgaatggaaaataagatctgaatttctaatactgtcttgtgtcatctgaactgtattatgagtataaaatgatttagcactgtgatatgtacacagtgtgataggaatgtagtgtagctacagtggggtgtgctagtggctttccaattaattttaagagctcttttattcattaaggatattacacctttgtcatattcattcattttctccaagattatcacatgctttttaacttggcagtgtttttattttctgatgaacaaaagttttcaatttttatataatcaaatatattagtatttttgtttgtgacttcttaatgctttgaaaatatatctccattctagggtcacagatacttcctatagtttctttattcttttatggcttcacttttaatatgtaactctttaagccatctgtcatttgctctgtggtgaggaatagtgagaatctaatcaggttaccatttttcccccatgaaattgaccaattaccctattctcatttgttgcatatgccgttctgtcctcccagatttgtgatttatgataaattgcatcacttcctaaattagggtttcaagtctcattctctattctgttccattaatgtctgtcacttctgctggtaccacattatttttattactgtagttgcataatgtattttagtgcttggtagcaggagtttctcttcataactttttttttttggtaacaaaaaattcttggctattttcaccagtttaactcttccaaatgcatttcaggaaatcccactggaattctgactggagttgcataaacctatgaattaatttggaaaccttttatatccttacaactattcaatcttcctgttcaggaaaatggaatatttaatatctttctaataatcaaatattctctatatctaggaaagtcatttttatgtatctcaatcaagttttatagttttcttgatatgggttctacacattgacttacatccatctacatttttgatttttatactgggaatgagatggagctgctgctaactctggagaaacttactgctgatcttttatctttggacatgatcctgactgttctcctaagtgatggattatcttagatttgaaaagtataggaagtaaaggacaagagggacatgtggggggatgtagtagagtctgttttatattcatagtgagaagactctgaacctcccaggagggctctaaaggttaaaaaacatgcaaccaaaagcaccgaggattagtaaaaagaaataatgtgcagtaagtgctcagagggatgactcattgcattggatcatctttgggaaaccacctactaagcagaatttagcagctaaagcgttatttttggtgcacagtttattgctacttcctcttgggaaaaaaagattaatcctagctccctaaaacacttaagaatggtcaccctggcaaaccggcctgtcaggtaacaatgttgtttccagatcagggcagtgttaggttccctgtagggatttcttcagaacaagggagaagcactttaccacatgttatggaaaggagtatagaccaggagacagaagatccagctcttagtgctggctctgtaactgattaacaaataaatcccagagtgcaggcaggccacttaatctctgctcatctgctaaaaaacagatatcacagcttctgtcgtactccatatcatggaagaaaataacacaaaataataaaccatgtgaatgaagcagttaaaactgctgagaaataaaattaacctgctcagtaaaagtaaggctaccaatcaagaacaaatagaatgaactgttactcgttccaaagttatttatttttgcttaatactgtatttccttctcctttttctctgtcctgtggtttcttttccttgtttcattatgactaaatatgcaaggaaaattcaatgctgttattttggtcctatctttggcccaaatctctagatttaatttacccatgataccgtgctgtgctatttaaaaagatcactaagaaaactttatagatgatgaagttaggaaaatgacaaataaggggataaatgcgtttccttatttaggtgaggactatggctgagaagattctgtaacttagacatagtcagggacgtgataagagcaggagctgtaatcagttttgctaatcatgatttctaaacaatactattttatcaagtatttaaatgcaatctatccgtagcacatttaaaaaaaagttataagaaatatttttaaatttgttattattattattttttgagacaagatctcattctgttgcccaggctggggtgcagtgaagtgatctcagcttgctgaagcctccattttctgggtcaatcattcacccacctcagcctcctgagtagctgggaccacaggggcatgccaccacaccaggctaatttttgtattttttgttttgtagagacagggttttgccatgttgctcaggctggtttcgaactcctgagctcaagcgatctgctgccttagcctcgcaaagtgctgggattacaggcgtgcaccactgtgcccagccaacacaaatattaaggtcaacttctggtttcagtacaaactatttagtttatttatgaagcaaatgaacttacaagaatgagaaggctgaggggatatgattatatataagatccatttgcattatacattctctagagaggtacaactctctgtcatatttttgattttataactataagagaaaaatatcaccggcaaaggctttatgtcactcataagaaatgaaacagcatttgataaaaaacagcatgtacaggaataaataattacattttggtaaaaatatatgttaaaaaagataaaatatttatgaaatatgttttcttcttcccctgagacggagtgcccaggctggagtgcagtggcgcaatcttggctcactgcaacttctgcctcctgggttcaagcgattctcctgcctcagcctcccaagtagctgggattacaggcatgcgccaccatgctgactaatttttgtatttttagtggagatggggttttgccatgttagccaggctggtctcgaactcctgacctcaggtgatctgcccacctcggcctcccaaagtgctgggatttaggtgtgtgaaccactgcgcccagcccgattgtattttcctaaatgaaaacttcaaaaattttgctggtatattgctttttaatatgaaagtgcaataaaagttgttaaaaatgcagccacatgttgctacacttacggttttagaaagagatgaatatgtagacataaaacaaaagccttgggaggtatttcttctatactgtacttaagactatgtggccacagagggctgccaggttttacagacctacgggttaaatagcaactgactgttttactcaaaaactccttttgaatttagaaaacaatttagtcagattttggaatattaagcaaataaatgtctacttccaatataaagtttaattactgaccagttagacttcttgatcatcactcgtagtcttggcattgtaactgagggacacattttccttgaaaatgaaattcagattctttcaaactataaaataacttctgatcacttttggctagataaaaatcctgaatgaattttaaggaaatatgtaagagaatttcaccttaagatcattatttttaagaaattaagtagataaaaaccagtgtgacctaaaaagtgttgagtaaataacttttcttcaacatcaacagctaataataataataaattcaatttactgaacacttattacaggaaaggggctgctttgctttgtttcacatatgttgtctcatttactcctaataacactctgctaagtaaatatcattatcctcatttcaaagggagaaactgagacttaggttaagtcaagatcaaatatcaaatttaaaaactcaacatctactatgcaataacagccaacgacaaggccaatggtatacatacaaggtgattaccatgttttggggaagcaggaaaaaagagaacgctgagataaatttcaaaatttgatcacttgctgaaaggcattaaaaaaaaatgaaagtttgtgctgtgttcatttatcccatctaattaagtagggccctttaaagcttacaaagcattatgagtaaaagtatttaacgtattacaaataacatgttggtataatttgttaatagacattgtatgcattgctcataaaatgcaccttcagatggtataattttagctcataactaatgtatactttggattactgtggttttgcatgctaaaaaatttaaaagacattttcattttctttatatggaaatttataaattttccaaaagatatagaaaataaacttttagtatatctttggcattatttttattaacatcagtatattttgaaaataaatgatgtatttcaaaagatgaacctggaagtaggaaggccttgataccagggaggaggctgcaggctgagcatggagcagagtgactctgccaagccaatcccatgtcccacaattgaacaacgtttcactgtctcatgtcttactgacccactcatttgaggctgaacttttttggtacctttacccactcatttgggagttctgccaatgcccagatagaaggatgcttcagagcaaatcggggtctgcctcactgagtcttgctttgtgcctgctctgacaggtagcaggacaacacaccctgtgttgaccctccagactgggcaggaacctcagtccaggtctgccattgaccggctgtgaccctcgtgggcaacactaactgactcagagtctctttagtctattccagagtgggttccttgaatgccttgaaggaacatcacttacctactaaattataataaaaatgtcctcaaattaaatatgtcttcttcactagtgcttgaagatgtcttttgacccccccagagttaaacattggatgccaatgatatgctgaaaattactaacttttgcttttccaggagaaccaccatatctcatcagatctaagatgtcaccagttgactgcaattcacattttgatttttagaaataaatgtgaaaaaaatgtagatcttagaaacactgcaatgtggtagaatagttggcaaaatagcaattttcttgttggggggtgatgaaatgcttcagctacactgtgttcagattctcctgatgttatcctgggacttatatcatctgcttctttatggatccacttaatatttcattcaatgaatacagatttactgaaaatattttctcaaaatattaaaaaaaatcttggcgctttggtgaacacacgtagaaaacctgcctccttaaagttcttgaaataaagaaagtacatatgagatagattctttgctaagcacttctgagttacaatgagttatttcttgataaccaatgaacaatagcgacattattaaacgtttgttctgcaaaaggcagtaaaaaggactatggggtaaactcttttgacgtaacttggtgaccagatccttaggttcttttgcatattagtggtctgaggagcatgttaggagactgacaaaaatagtctcaattaaacgctattctcttccttcaagaaaagctttcttgctcagcagtattactggacagcatggctttggtgcttaaagccttcctgttctcactggaaaattggagtcagtgtcttaggcaccaccatgctgcggcaccctcacgcctaatgatcacatcagactgtacaggcttcaaccactttaaacaatttcctttgtctccccttccttttctgtaaatttttttgttgtttcgttgttatgggtagtgacagtttctggtttctttcatttgccaacggtttcctttaccacagcctctattcctcctgctggaagcctggcaccattggaagctggaataaaaaccacaactgaatagcctggcacttactttaacagtcatttccaaccacagattaatactgttactggatttgactaacggctctcaatcagcccaactgtcatcacttgagaacatgctagccagtgaaagccaaaaaggaaaatataagcaaattcaaattatggtataatttttctgattgctcatcttttgaatccaagggtatctatctctctaaatatcttcttctgggttctccttaataatatgtttaatgtatatatagatcaggagataatacaccacctggctgcaactagtggggaggctgaagtcaggagggaagggttgccacaggcactggctagcacaagagagcacgccgctcagctgcccatggaacgtatatgtatcctgcaccttgctctgcccacctttggcaacggcactggaaacagctggtgttaagtgtgctaagtagccagcatcaaagtgcaaatggaagggggccctcatggaggttctgtgttgataacagtgatgttcaatgctagcctatcataaacaggaaccaggtttttctctttatcatttactttgacatagtagacttcaggtccagtgcagctgataggatttttcaatagatacaaaagaaggatggtatagcacattatacggtatatgactggcttaatgaaaataagagtctatcccaacttggagcttcccgtatcaacaaaaactccattttctatgactgaaggctttgacaactcttactaatcccagcttttggtcctgacagaatctaacctacagatacagggaaaagaatttggatgactattactttctgactgacgacttctgggtctactctgggtatttcacacacatttaatcccaatcttcctccttaaaaatgtattgaatgacattcatttaatacacccctggagggaaaataaagtagaaaaatctttctggagggcaatttggctccacgtatcaaagggctcagggttttgaatatgctttgtatcactattccacttccgggagttagtcctaaaggaataatcatgagaatgaaaaaaactttacttacaccaatgtgcatcacagctttccttaaagtcttgcaaatttcattcactcaaccaatatttactacatgcctactatgtaccagggaatatttaaatacaaataaataagatccagatatatttttatataagaaaagcagattacaaaaaagcatgatctaattttacaagaaaattaaaatgttataatgcataggaaaaacagttgaaagataactattaaaccattagtaatggtcatctcttggtcactggtttatggtttatttttctttcctctttcttttcctatttttatttttaaagtaagtatcttgtaaagagccattttgacactacgtaaatctcttgatgaaatttccactcagtagttttagcatcatccattgatgattttctaactccatcattcactctgttattattgattgtcagtctactgtaagacaaagctctcttttctcccactttatttatatcagcatggactcatggattttaattttattcaggaggttataatcctttactataattatgtattttgatgcccaaattgttttatatttgtccagtggctccttcaagctaaattctgtgcctttctggtatgttcccatattttttgagcattttcttactttctggtataacaagatactatagacttatactctttactcgtattttaaaagctctacaacaaccatgtatatttttgttaaatgaaagaacataatacatactatttaaaaaataatcttacataagatgcatacattatacagatttttataagatttttaaaaaacagtccagattgctgatcctacatggttcaggaatattagaacaaatgggccttctgagctccacctgagatgggagaggatagcacctgtcttacaaaccaatatgaaaggaaattatgtctagtgagatcattaaatgcataagtcattgctctttacttgactaaaaccagtgagccggccacacagccttagataagaaaggtaacagttaaagtacattctgttcgattaattaatgtctcacagccaaatgtctctgtcttgccccttagaaaactgcatagaagaatggtgagacaccatcattttcatctgagtgactgagtttcttcctgctgactgtttggagttcccctgtgagctggcgtaaggtacttcttcctgtggctcagagtaagactctgagagccttggggactgccctctggattctgtgaggaactatggaaaacaagggaagaccaagtaggagcccccaactcctccttgtggaggagtcagctgaccccacgccttgaccccagagccctgcatagtttctttaatcttattagatgggtttccttaaactcactttcatgctcagccttttgccagactctaggaccagctctggcctttgtggtgactgtggtgggatatagggggagagatataaggagcactacaatgattagtcatcacttcactattgagtcatttggccatgccgcccagcccactgtgacctcagttcatgctgtgtaccccacgcttgaggttctgtctagaatcccagtactccaggtccttggacttttttgattctgaattcttctaatgtcttctgttacctctgagaagaagccatcctttatcctgttctagaaaagtgatacaccaaggtaatttaacattatgaacaggaagttcagtggctaagtttcactgaacatgtacaatgcaaaaagacaaaagtgaagtgctttatacatactgtttaacctcagatcaatgctatgtgggggatatatattaatatcctcattttacaattgaggaaactgaggttgagggatggttaatgataactcatcatcattgagctaagaagtgatagagacaactagatgctccaaagctggctctcatgaccacttcactacatcgcatcgtttggctatgactacggaactgctagtggacttgagactcaggctgaaaaaagaatttttttttttttttttgagacagggtctacctctgtcaccaaagctggaatacagttgtgtgatcacagctcaatgcagccttgacctcctgagctcaggtgatcctcccacttcagcctccaaggtagctgggactataggcatgtaccaccacacctgactaattttttgtagagacagggtttggccatgttgcccaggatggtctcgaactcctggactcaagtgatctgcttgccttggcctcccaaagtgttgggattacaggcttgagccaccacgcccggccaaatcccgggttttaaaaaatacaaatgaactaatgggaataacactggtaagcctgatgttgagaccaagtagtattcttcagttggttctaagaaaagaaagaggtgatccagaggagtctgtaagtccatgaagaacttggaacaggtttgccattatagcacgcttcagcagctcattcactcattcagcacatttggagtctgtgatgtgcttatcactatgctgagtgtagggaacacagaaataagactgacgtggtccctgcccttgtgaggcttacagtttagggagaaagaaaatcattaaataagtggtaagtgttatgaagaaaataagatatgctggtggagaataatagaaaaagcctctttaaggaggtgacatttaacctaaaggatgaaacagaggaggcaggcctgctgaggtctattcactttcttttcatctttggttgtagctagaatttttgagtactcttcaagggagctttatgacttgggttctgttaaacaagtcaaccacgatttttaatccatgtgctttatcacgaatggtttccttcaccctgttcaaaacatcacaaatatgatataaatgggacacttactattcagtctaaaactgttctcatttatttacttattaaatacagaaaaatccctttagaatcagggataagaggaaaggtctttgtgtttcgcaaagttcatccaagtgtactatttgtttcttccccatggaattgtcatatcagctttaggaaagatgatgaaagaaaagaaatgggcccagagggacctaaggaaaccaggccaaacttgctgttcacgtggacccttacagggagaatggaaggcaaaagcagagaactgggtccaattttctttctcagtgctatctgtgcagtggtcagatgtggcactcacaaccaaaaggcttttgaaacagcactggtgagtcctgacctaccttcttcaaatttctgaaaatgatacattttattatctcatgagtagagatactggagattactcttaaggcaggaaggggagacctagggtccctttctttgctataattaactgcattttctctgggagaacagaagctccccatggatatatggggttgggacaagtggctatttacagctaagaagggaatatttttgaggtttagagaattcaaatcacgattactatctcatgttcaaagactgaaataaaaatggctgtgtactctcttcatggagcaatttgatgttctgaggccctctactccctggcttctggaaatctatttttccctccatcacaatatttcctttaactactgaataattaaccctagtgactaacctagtctcataggaagaaggcttgtgaaatctgctcctgatgcatgtaataagtgtagaaggacacattaagtaatgtgtacagtctgggaaggccaaaattcctttcccaaggcctggtccaccctgaaaaagaggaaggaaagctcatactttaattattggagcaggtattccactggttcacacattaccaggaccttagaggtttcttctatcatacagaaggaacctggatcagcacactcgcctactcttctttgtctgccagtggaactccacaacaactgaccgaagctgtcaccaccccaggctgccaatgtgggcctccagattgtgaggccacagggtcagatatggggcctggcgctgcactgacagtgctgcatgtccaaagaggcaagcagccaggcagagccctctctgttacagcttggccacctgtctgagagggaagacaaatcccatttcatcgggtttggcatggaaagcaaattgttcacccccacacgcaaaagctcttgagtggcagaaggaaaagtacacaccccaggtgcgaatataaaagcgggtctctttgggatgaaccttctggttaatttggtttggagtctatggtgttttcactcagctctcatcagtttttaagccgtattacagctcccaggcttttaggataattctcttaatgaagtaatgaaatgccaaagaaatggcatcacagggctttgccctttcctgctttttaaaggccatcaaaaccatcattccctaacatacccacacaggaaaaaagatgaggcttatcttgtttttaagctattgtgttgccagcatttccatcgtacaagaaagataagtaaatgcttgcaaaataaagtctgacccaagcttcacctgatatgcagtttctatcttgctgagtgcacatgataataagatttccaagcagcattagaaaccatggttcaatccagaagtgtgctcctgcaacccggggagggggctcctgatgacttcacagtgaagccaccgtcacaaacaggatttcctaaagaggtcttagggtgaggaagaagcttcattctaactttggctctgccatctgggcagcactgctgctcctcccctcctgtaaacaggcagttaagagggggcaggggcactccttcctattgttcctcatggctctcacttccctttcatctttggcaatagctggaatttatgagtatgttggatgaccttccaagtctttccttcggagtttatttacttcgtggatactccttagtaaggctccatcttttggcggctcacaccccggctgtatttgtccaaaggtgtggctttatctctgtatggtattgaattgaatggaaaaggagtcataaagactgtgtgattcatataatccaacggtgattgtgcatacacgacactatttcccaacttataccttccagtacagccaggtcttgcttttctgagaatgaatgcactgctatttttgtggcttgcctaatgaagttcttgttaaatatccaatcaaacatcttcaaaatccagctcaggactaacttcaggaagcccctattattctagttcagggtaatatctgacttttctaagctcttaacagttttaaaaatctgtaccatgtggctcagcacttacatatgcctggtctgatactgtttgctaattattacatgctaacacatcatgcacatttttatttgctcatgtaagttataacctccttcaggctcagtcttcaggtttttgctatcttccacagtgcccagaatgattgtaagcacctggtaggttttcttttttctttttctttttcttttttttttttgagatggagtcttgctgtgtcacccaggccagagtgcagtggcgcgatctcggctcactgcaacctctccctcccaggttcaagcgattctcctgcctcagcctcccgagtagctgggattacaggtgcctgccatcacatctggcaaatttttgtgtttttagtagagatagcgtttcaccatgttggccaggctggtcttaaactcccaatttcaggtaatctgcccaccttggcctcccaaagtgctaggattacaggcatgagccactgcgcctggccagcacctggtaggttttcaaagaatatttgctcattcattaattgagagaagaatcccatgggattcttctgtaagtttcatttccttattatgcaactgagttaaatatattaagtgtaaacattagaactaccaaaggaataatgctaggaccagtattgacttaatatgtttatactgttttgattagtaaaatgacataaaacctctgaatttaaaattaagtgctttctgggaatataaaataaaaaaatgactaaactctactgaagaaaaatcttgagactaagtgactgaagagaaacatgggaaaactgttttgaaaaaggcaaggagcaaacgatgcatttggcccattttatgccagagctactcacagagtgatgggctctgacctacaggctgcagtatgttcattcatttattcattattcatttacttagtagccactttatgccatgctctgttaggtactagttatacagtggtgagtaaaatagagagggtctggtttatagtttcatgagtgatagggcaaacaggttttaagccagaaaacactaaaataaatataagtgcaaactgtgctaagtgctatgaaggaaaaaagtcaaggtgttgtgagagtgaatacccgaaggtactgattttactctgggtcaggaaaggtttctttaaggaaataacatttaagatgagattggaagaatgacgtggagcagccaggaggtgagttgaggaggtgagtgggcaatgctccaggcagatgactccaggaatctctgcaggcagtttcttgaagggaccgatataactgctgcttctgcacagcaaagccaataaacttatggatccaaataagaatacaggaaattcatatactcattcaacgaatctttattgaatgctgactatgtgctggatatagttctctgcctctgggatatccaagtaaacaaagcaaagatccttgccctgtggagtttaagttctatagtaagaaataaatgcaccaatatattttcatctaaatattgcaggtttggctacagaccttgatgtgtgtataatgaaacttgaaaggtctcagaggaaggaacagtggtgtagtggacgcaggggacagctgttccctgttgggagacaattctgcatgggccctttgtatttctgcacatcttgcaagtagagacactaactgcatttgtgctggattagattttcaagtaaactgctttggaagatgatagtgtctccctctatagcatgagcaggtttgtttgctcttaaacatgataatagcttctgctggggcaaaggtaaggccgacttaactgaccattataaaagattcatgttggggattcgtttttgtaacacaacccgtgtgtgtgtgtgggtatgtgtgtgtgtaagtgtgttcgtgcgtgcttgcaggtgtcatctgccccccttcttattttcctatgggaattgggaatctggtgcaaatgctgatactgtagctactgctattgctgtgagtaataaactaggctttgtctctaacccaagagtcttgtgtcttttgccagcattcatgaaactgtggtagactaatttgttaacctgcaaataggggaaaaatctcacatccttcgcaggtcttgacatgagtcaagtgacaaaccaaaaaatggggactttttagttgagaaagacaaagaccaaaggggtagaggataaggctgaagtatataaaatcaacaaaagtaaacttggttgtattcaccagtcttgaatatcaagtgaagggatgaatccctgatgtttgagagaggtaagtttatgtcaatagaaaggaatttcttcacatacaggatactaaccttatagaacttaccatctcaataaatggtgctggctgaaactacaaattattttataaaaggcctcactaaagtgatggatgacaaacctagaatgcccagttcaatacgtattggatgaccgagtgtttgccaagtgaccatctataagatgatctcattatctgtgtcagagaagaactactgggaaaaatcattaatttgacctaacaaggaccatttttaatctacaaagtgagaaatagactcttcactgctttatctagttttagtttttactatggatacacatacataaacatatacatttgggatatgtaagtataaaaatctcctttacaacaagctacaattcataatcatcttaattcataaatgttaaataataatggtaaaatatgctcctattttagggcagttgtttcccaagctggatgtgaagaacacttccaggaaattttaagaggcatatcttgaaaaaaaaaagtctcacggtcaaatatatttgaggagctatgcactatatgtatatatctttggaaattcaaaatttacattaataatgagggctgtgataagccctgagtcacagaaacctttaagctcgtgtttcccaaatttttagtattgaccgatcatttcacagcatgcccattattatctcatgaaacactattccatgaaacagcagattgagaaatgcgtttgtcaattgttaaaaaatgaagatttttatggcaaggactgctataatgccaacattatctataaagcctcactaatttgaagttaaaaacaccagtgaagtggggacagaagggcctaacaggtgactggatgtcctggtttgcttctctcatacaggtggttgggccatcttcacctggggggatccttgggattaattgtttcttgtgtccaaggagcccgaatgccccaatttcatgaatattttcatgtttaaggcaaggataacaatcatagttatagctaacatttattgcttccaattgatgtgctacaatgccattttgagcactttatattctaaaattctcacaataaaccatgagagaggtagttttattatccatgttcacagaaaaggaaactgaggcacgggtggttctgtcacttggccaaggctatacagctagtaagtggaagagctaggatttaaacccagacagtctggctccaacatcaactcctgtgcttaactacctttggaattacagcatatgtcagcaaacttccacattaccagtgtaattcataccacaaagcaattcactttaccttctagttgggttgagcctaggtaagtagccttcagagcttaggaaccataaataacaaccagaccttgtgctaacacatcttgaaaagcttgtctaagctttacaattgtaccagaagaagtaaaatacaaataggacagcatgtaccattgccaaaacaatctcccctttgtatagttttttcttctcaccaatttgttactatatgcaatactgactttaagtaaacaaacaagaagctacaaacaatacacccaccctcttttaattacagcactacaacaaggccactttgttaaaatggttcatctctaaaatatttttcttaccaaaaatgatacacagatacatacacactcatgtttccccctaaaaccccaatcctttttgtatgttgtgagtggagtgcagagaataaagctcctactgagtgcttttggccttcagatttggtgctcattactgtgtagacattctcagccagagcgcgacaacaggcattcagaactgtgttttctgcaatgtttattgtttattccacgatcttttgttgtttttttttgttgttgctgttattttacatgttggcatattaatttctattgctgttgtaacaaattaccaccaatttagtggcttaaaaaaacaacactcatgtatcatctcacagctctgtaggtcaaaagtccaagtatggcatggctcagctggttctctgttagagttgtacaaagctgacatcaaggtgtcggcagagctgtgttccattctggaagttctggggctaaatctgcttccaatctcatacgtgattgttggctgaattcagtctgatgtggttgtaagactgaggtccctgtctccttgccagttgacagctgggggctgcccattgttcctagaggtctctctctggttcctaatgtggctgctacgtctcagagccagcaaagcatgtttgatccttctcatacttggagtctctctctcacatctcttttgcttctagcctgagaaaattctctctctttttttttttttagacggagtctcgctctgttgccaggctggagtgcaatggtgcaatctcggctcactgcaacctctgcctcccaggttcaagtgattctcctgcctcagcctcccgagtagctgggactacaggcatgcgccaccacacccagccaatttttgtatttttagtagagatggggttttaccatgttggccaggctggtctcgatctcctgacttcaggggatcctcctgccacggcctcccaaagtgttgggattacaggcgtaagccacggtgcgaggctagttctgtttttaaaggactcatgtgattaggttgggccccctcagataatccagaataatctccctatggtaaggttcataaccttaattacatccgcaaaatcccttctgctatgtaatgtaacaaattcatagtgtttagggtgtagatatattaggggaccattctgggtaccacttcaggtgaacatttctgtgccaagatggctaacaggggtgaatgataatgctaaatctgccccaaaacaacaaacaacaacaacaacaaaaccaaaagaagaatttcactgacattaaattctaaattttacccatttccagaagcctttaaggtccaagaaacaggataaagatcagaagtgagttagggactaggagtagaaggtctttgatattataaggagcataatgaattgctctagaccagcatttgtgcaagtggtagctggaagaaaccactgccagaaacagagtgacttcagggggcttaaagagaatacaggaataacagcaaatgtctactcccaggaatgcatttctataacctgaaataatactaaaaaacttttttttttttttttgacatggaagaacactggtgtcagctgttaactctctagtggtggaatcttagggaggccctgggatcttggagaggggcaggggcatccagggagctggggcactccaaggaggggctctttaccaatgggtctggaagcacatcaatattttaacaatgggtaagggatgcagtaatatttataacactgaatattggaaatgtaatccaataacatgaatgagagtcaacacgctcacttatagggaggaacactacagcacaaatacttttgaatttcaacatttcataacgtattgatagattgttatttattaagcagttccacaaatactgaacattttgattaatttcactttttgtattaatatagatcatcttcaagtagagaaatgcatgttaagaaaattgggaaaaatgcaagacatgatatcagaaggaacacatcacccacctgagagtttaaccctatttgcctttgcatcactttctcaattctcctaaagtgtcaattttgttatttgctgtctgccttaaggggactgtaatttagctactccattttacgtctttataattctttcttatctcattcatctccctttccatttcatctttggtttttcactttgaatagcctttcatatatttattttttaggtctttagagaccatttctttctagtcaaaggtagggtaaaatgaaacataattttagtcatacttaattagacttttaaatctgatggtacactctgcctgaagcttttcaggggggaatttctgaggtccaattacagggctagtctcataataagaactaataattcataatgaaattatttgcttttaaacctcatccagacgctgttgtgaaaaatatactaacccaaccacattcctatagggtcattaacacggccagtacaaacaggtgaggtctgctgaagtcatagttctcagagcttctgtgaagagctggatgttggttctgtgacagtatcactacagggcaaccctttcataccagtcctttcatagtatggcatcctgttcttgatgtatggattttgatatccttctcagctcaggtaaatgcccaatgggtatttaacaaatatacaaatagaaactgaatccttgcatcactaaactttgtgttgccttcacacattaagacaacttagctgaaaataaagttcttgggttatagacttagcccccaacaaagttgtagaattttccctattctcctctggctttggttcaacaagagagaagtctgaggccagcttgattttctttcctttgtgtatagctttaatagaaacgtattttatccttgtaggttcttttctttctccctgcaattcaaacatttttccaaatgtgctccacgtcaatctttggagtgaattccatggattgtctcccctttcaccttgtagcacaacactgatgttcttcaatctaccatctatctgataagcaaattcctttgttccggtctcagtcactggttccactgcaggcccacatcacaagcagccctaagaatgcatctcagggctcctgtttgaaatcctgacacagaagaacgtactctttatctgagtatcctgcagggcagatgtgaaacctggaactactgtaaccgctttgccaatgaatgaaaacagcctttgaagatgccaagacatagaaaagggaatgttagagaaatggagctgcagcttctggattaagccaaccctgatgctcacctatctctggaatcaccgtttatgtgagtcaacaagttttttattctttagtggatccagaatgagttttctgtattcacagccctgagcatctcaagtactaatgtctctttttaatgattttcccccaaatattacaggatcttttaatttgtgtactcaagtttttcctcagtttaggaacatgtttctttaattatggcttttattactgcattttaagaccatcaatttcctttctcttttcgtatttagagacagggtctcaccgtgttgtccaggctggtttcaaactcctgggcttaagcaatccccctgccttgacctccaaaatgctgggatcacaggtgtaagccactgcacccggcctcaagatcatcaatttcttaggccagatttctattctttatccttcatgtttgtcagtttctcaccattttataaatcttttttccttttttctcagtattttgtgagaacttccaatatcatcctttatgtcaatggttccatttcctacagtattaattctatgttttactgcttcctatcagattttaactgtgctatatactcagtttccttacaattccacttatcattggtctctccatctcagattgctgttttcacattttagagtgttcaattcttgtggctttttttttttctgttttagagagtatgtcttctagcattcttctcagtctactgacttttagaaattttcttctgatttagctaatcactttcagaatttttttctttggttttttgagtcttttgggaagtgttactttaccctatctagtagtattttttcaaaagttacaatcattttttcttttagatagttgtttttcattttctaagaggagcaatctaaccagacaatttgtagtcaatgcaatgtagacattactttgaacttattctgtaaatatttaatggtctctgagtagcttagatgtttatatctaccatgtttcttctaatattactcttatgtctctgtccccacttactaaatatcccattcttctcacctccagacccctagttcctttttgcatgtatgtgttttctggtatttgaagcgtcttacccgagagagcaaaagatgtaatactgtggagtaggtaagacaacagcactatggagctctcaacaggaaaggtagtgggaagagctggccattttctgaaccgaagtcaaccttgtgtttctgaaacaaggggacttgagggaggggaataaagatctacctatttccaggtgcacataacaaacctgtgtcaccaaatggatatatatatgtatatttttctgagacagaaaaaagcctgtcacccaggctgggttgcaatggcacaatcatggctcactgcagcctcaatctcccaggctcaagctattctcctacctcagcctcccaaggtgggactacaggcacgtgccaccatgcctggatcatttttttttttttttttgtagagacagagtctccctatgttgcctaggcttgtctcaaactcctggactcaagtgatctgtccaccttggtctctcaaagtgctgggattataggtgtgagccattgcacctggccaccaaatggatttttcaattcagttctggctaaatgaaaattcttcctataattttgataattatttcactgccagtcttagttttttaatgctggatgttttgaggggccagtaggtatcactttaaactaaaagctcccaatattttaaataaattttgattgagggtttacagaggtaaatgcaaaaataagctgttaatatgcaatctgtaaaaaaggtactaggttagagaaaaaaatgaaacatgtctaagttcagtgctgtttttaatcagggctgtatgccacctaacagagtgcctttgaaaacaagtttattgcatgctgatgcctagagaattcaatatgactctgataagcaaaacagataaagcaattggcttccaaattacttctgaatattgaaatattagcatgtcaaattattacaattaaatggttgggcaacacagtgcaaacacatttggcacgctcttgttgcccaactttcaaagtattggatctcctcccaagttttagactgggaatgtccagcaaactctgtgccagtgataagagaagagctggtagtatccagttcagttcatggtaaaatctaatctccactagaaatctgccatcttgaattgtcccttgcaatgtttcaattagcaagtaagtacaatccatatgtctgcagctgtctgtcacacctttctttttcctgttataaaagtgcatgtatgtgcatttgcacatacacacacgctcctaagcagccaacaactcttaaacaatcctatctatgagtacattctaatacctgtaaatttaatttggcaagcaaaactggagcaataaatcacaaacccaattctatcatgtatttccagagaaggttaaaggcgaaagaccatgcggaatgctctatatttcctatggttaaagtgggagggagagaaggacaaagggagagagggaaagagaaggaagagaaggaggagaacaggagcgtggagggagggaagaagagaaagaagatgaagggaggggataaaagaagctaggtaatatcttttatttctgtaagaatatacccaatgtttctcagttaaaccaagtgctgggtcttatcagacaccagctccttcagccaccataggaacaccagatgggaggtagatgctcagcgcaaaacaaaagagcaagggtatcagacagccacagaccactccacagcaagggcccgtatggagttacttggtttgtcactaccccctatcattttagtacaagacctagtagaatcttttgacacatcttactatttgttgtaatttagcgccttggttgtgtttggtgggaaattatgtaggcatacaataaaatctcagcaatctacatttacctgaagttatttactatatttattattgtctagtaaatttgcataaacacaataaaacaaatgtaaatgttacaccacactttaaaggagttaccaaggccagactcaactcagattggaggtccaagccccagctagaataattttgtgcaggtgtggttctttttattttgtagggctatgaagtacctcctgctcatgagaaaaatgagatggtaagtttgccactgactaaagattagactggtaagaactgactttccatccaggacacaattttcctttagagttggccataaaactttcattccagaggtgcccaccctacacctggaggataggagcattcttatctctgaagacccggggacacagaatgcacctgaacaagcaggccttgccaggtttcccccagtttattaccattagatcatacccttggtcttccggccacacttctgcatgactgtccataaaaatgcacagttgtctctgtttctttgggtcttcatttctgaaggctcccatgtcacataaaacatattaaataaatgtgtatgtttttctcttaaaaaaaaaaagaattggctttcaatgtataaaatagtgactgtctctgtgttttataatcaaaagtgggtggcttctggacctcaagctgaatattttcatctgactcaatggctgaaagatgtgaccaggtagacctgagactttatgaccaggtagacttgaaactactagtttgattattttcctattgtaagcagctgatggaaaagcttctagagttattccaaggagtagacctagaaggcatccaaagtaatgatgcatgagcactggtgactaagaaggaaaaatgacatgaagcacctaaattctgcctggaaggaatatcataactcaatatacattattcttcaagcctaggcacttctgaaattctgtagaataatctttgaactgcctgtgcactggaaaaaaactggtctgaaaaactgcttgggatgtgatctgagataatttttttttaactgacaaaatgaggttgattccttccctatcactacccaactgataaaaaggaaacccacagtgaattttacagttgaaagatgtctcttatgcatcaaaccaaacttaacaaaagttttataaaattaccatattcacttatgttttccacttaatatttttgacacagtctcactctgttgcctagcctggaatgcagtcgtgtaatcatagctcactgcagtctccatctcccaggctcaagtgatcctcctgcttcagcctctgagtagctgggagtacaggagcacatcactatgcccagatgatttttttaaattttatttttcgtacagacagggtctcaccatgttgcccagactggtctcgaactcctgagctcaagtgattctcctgttttggccttccaaagtgctgggattacagatgtaaggcaccatggccaacctccacttgatattgttttaatgtagtggtagaaaaggtagcaaggcttacataagagttcttttcttgctttactcttgacaacctttcttcatctttgagaatctcaatcctacctcccacctcaagctaaaaacagagtttagttgaaactttttgcagggtaatttggtttagctagcacaatttaaaaaatttgcatgtcatttgaccctgtaatttcacttctggaatttactgtacagaaatacctggacgaatgctccataaaataagcacaaagattttactgcaacactgtttgcagtaaatattgtttgtattttttgaccaaaaaacccctaaatgtccatcaagaagaaattaaattatgaaataaatgaactgacagttattaatctgtttaaaaatgagttaaatctctaggtactgacatattatgataaaataaagcgaataagcaatgtacagaagagtatcgggtaagcccatttctgtgagaaaaatttacatatgtacatgtgtacctatgtattttagcatttataaactctctctctttctctctctctctctctctctctctcatttgtaacaaggaagatctggaagtatatcgaggggactatctttgggagttttggagaagtacaggaaagacaatgttcacattttatacttctgtattaacattaggtgtttttacaaccagactatgttattttactttttcgtttaaatttttttaaaattaaataaaactaacaggcatggaaatctcctactttgatccttcgtacagcaatttttgtttcttaaagtgtcacgtggagtgaaagatcacagagacaatgaggctccccaggtgcaagcattttttaaagtaaggacatattgaggatgatccactagtgtcgataaacactttatacttgcaagtttgagctcaagcaccattaattcaggagaagaaggccaggcagctgcatcaatatcagcttggctggttttacatgcaagggccccaacatctatagcccctacacaaccagaaaagaagacaatgtgggacacagaagaatgagacttcaatgagaagggcactgacttattttctcccctcttcccaataaatggcaagttgtctctgtttcttctttaatttatccttttatttgatgacttagacctgcattgtccaatcagtacatgtggctactgagcacttgaaatgtgctgaaaaaagtctgaactgagatgtgctgtaagtgtaaaatacacattggagtttgaacagttagtaaaaagaaagaatgtaaaaatatctcattcatccatatatttatattcattacatgttgaaatgataacattttggatgtactgtggtaaaaaaaatatattattaaaagtaattcgacttgtttctttctacctcttaaaatgcagctactagaaaattcaaaaatacatttgtggctctcattacatttctcccagacagagctggtttatacttttatagatattccacatggcaatgcaaatgttcagaaaaaggaatagcagggtagagaagtaggcatgacacacacacacacacacacacacacaccacacacacacacacttttgaattcataataaggaagaagtggaagtatatccagggggatatctttgggagtttggaggggagtacaggaaagacaatactcacattttatacttccatattaacattagtcatattagacatagtaagagtttcagaaatgaccaagatatggctttctcaaagaatatcagagttggagtgaatcttggacatcatccattccagtgttttagggtctttttaaatctcagaagcccaatatagaaaaaagatgaaagcaagatactctgattaaagctgagtgtgggaacaagaagggccgagaaatctctggactatgcataggaagggaatctaagaactctgaagcacagtttgaattccatggatgtggtatttcagcctctccattttataggtaaagacgctaagttccagaggttgatggtttgccttcagtggcaaagctggtaggggtagggctggaacccattcttagatgtctggttcctaagaaacaacaccgtgctctgcatgacatcattgctgcacctatggtggacaacttgtgtgcatggaaagatagtggctcaggaaagtgctctgacataggtacagacacaatgctatggggctactgtaagcacagtacagtgcttcaggcctcttcgttaaagaagcagcttctagatttacctttgaaagatgacagaggcagctgggcacccaggacaagagaagagcaagggttctaaggagaaaaactttgaggcatgttttggggccaaaaggtaggtctctttcactaatagtgacatcttggagaataatatatgcaatggccagaatagagttggagccttctttcaaaaggtcttgagagccaaggatcctacaccagtcttagcaagattttgaaaaacagtgataataagaatattaatttatcataaatacatgaatgggcaggaaacagggagacagattggcaggttactgggtgactgttaaaggcagcctcaattaatgagatgcaggtcatgatggaaatgggccagattggaggggccccatggagacagaatccacaggacttggatacagaaggatgaagatgattccagggtgactctgaggacccagctggggggctgcgggatgagggttccattaacagaaaaagggaaggtaagagaagctggttagatgggttcagtgaagaaagggtatctgtgaggtggttggtggaagagtcagtccattaagaaactgcagtttggccctggagcccatctgagggtcatctatatcttatctagatagaattctttgtaaacacctaggtttgggagaagggagatgaagagccagcaaaggggatatgggcagaggcacccagaagtgtgctttttaccaacagtgaggacagggaggctttcacggagtgagtggccacaagattcaaatgctgcagacatcaaatgaaatgagaatggagaggaggctcctggatgcaatgatgaggaggtcaccatcaacctctaatatagcagcttaagtgtcaggaggactctgaagtcaaataatcctggttcaaagcctcttcttgggcctcagttttcttacctgtcaaatagggatgacaacagtgccccttataaagttattctgagattaaaatgaaattgtgtattttaaagcaccaaatatagctgaccctcgaacaacatgggggttaaaggtgctgaccccctgtgcagtcaaaagtccatgtataacttttgactcccctaagacttaactactaatggccgagtattgactggaaaccttaccaatagcaaacagctgattaacacatatttggtatgttgtatgtattataccctgtattcttataataaagtaagcagagaaaggaaatgttattaagaaaatcatgagaatgagaaaatatatttactattcattaagaggaagtggatcatcataagggttttcatctttctcatcttcacattgaataggctgagggtaaaggggaagaagaggggtgagtcttgttgtctcatgggtggcagagttggaagagctggaggtggtggaaagggagataggagagtcaggcacacttgctgtaacttttactgaaaataatctgtatataagtggacctgtgtagttcaaacctatgttgttcaagggtcaactgtacagagcgtggctcacagtaagtgtgcaataaatgttatctattatttttatgatgggaagggatgaagaaatgagcaagtgaagaagaagtggaggctacatgtagagacactattctttcaagaagtctgggcatgaagggaaggagaaagactaggggaatacaaaggggaatgagaatcttttccagaatggagagacaagggcatgatttgactcttacgaggcaagtcagaaagggatgatggatgaagtgagaacctagaagcagggtaggaacaagagcaagggttgagggagatttgccttgtaagcagggagaatgcatccttctcagaaactggagggaaggaaggagaaggtgaagataaagagaaatttttgaactgaaagagaaaaggaactcacttcgagggcttcactcatcttaattaactggagatggggctgaatgttgggttgggggtgtggaagtaggttggggcttaaggatcgtggggatgggaagagaagtgaatcctagcatggaagtgggtctcagaccaaaggaggggagctggaggggaggaaacatgcccaccaaaagcctagatgcaagtgttaaacaagcacgtgtgctctagttgctcttatttctgtctctaagtagagctttcttttcagtggtggaacatttggatgatgaagtccctaatgtacaatgtcatgagaagggagaagaaaacattaattctcacgggggtcactaaatgcttgtgtataggctgggggacagggagagtgcaagctgagtgatgcagctgctgagtcaatcaagaccctcaaactgctctgtctccacgtatttgcaaaacacttctgtcagtaacatttactcttactctgtagtgactctttgctggaaaatcatgggtcctgaaaatctccaggtcatgccattaggactggggagacaggagtgtaagaggattgcaaagagaagttgggaggctttggcggaactgtgcccccaagaagcagatagctaaaaacactgcaattcccttcttgaggggatagagcacctacagaaaaaggccgggttttagttaccttgaagaagattgtgagtaaaagtttggggaagaaaggaacttcttcctatgtgacaaggattccaagagtcagatttgaaaggagtaacagaagtagagagtcagcgaggggaggtattgggggctaagaacagggatgggaacatgggaagaagtaataaaccagcagttgttagtaagagggaagcaatggcttgggaagtaagagggaagaaagaatggtagagtggtatatgatatgtgatagaatggttagaagaagactaagcagataaaatctggtttgtggtaaagatcacagaacaggcagacctaggatatgagaatggaggtgccctggagtgggaaggtggaggaccaagagatgccgccacagggaaaggccaggtctggtggtggcttctcaatatatgtcatgaaaacaaatatatttttcaaattcatgttaaagtacacatcaagaatttaaaaaatcaggccaggcacggtgcctcatgcctgtaatcttagtactttgggaggccaaggtgaactcctgagctcaggatttcgagaccagcctaggcaacaacagcgaaaccccgtatctactaaaatacaaaaaattagctgggcgtggcggcatgtgcctgtagtcccagctactcaggaggctgaggcaggagaattgcttgaacccaggaggcggaggttgcagtgagccgagattgcaccactgcactccagcctgggcaacagagcgagactctgtctccaaaaaaaaaaaagaatttaaaaaatcaatattaataacattaccaaagtattaatttgttcttacttagaactaccttgtttgcattactcaaccaaaattggaccttttcctgggtaccatcttggatatttcctcactcataaaaatgctttttaaagagatcttcccagccaggcacggtggctcacgcctgtaatcccaacactttgggaggccgaggcgggcggatcaggaggtcaggagatcaagaccacggtgaaaccccgtctctactaaaaatacaaaaaattagccgggcacgggggcaggcgcctgtagtcccagctactcaggaggctgaggcaggagaatggtgtgaacccgggaggcggaacttgcagtgagccaagatcgtgccactgcactccagcctgggtgacagagcgagactctgcctcaaaaaaataaaataaaaaaaaagagatcttcccatttggctggttctttaaaggaagaaaaaaaaaacaaaaacagagtctaggaaaatatccaacaaaaggtaagaaatctgaaagtctaaagtgccctggtttccatgcacgtgtttcgacctaacctgaaatgatgggtttcttctcacaggctagggcgtgccttctggcaccctggtgttcaggtcagcttgtgaaggacctcatttcctggatgtcactagggagggtgctcaactatggggaggcaccaacacagtaaccaatgggaaaattggcaaggtagtcagtgacattttaaagacatttgctcactgaccactgacccacaaaggacagtttcactgtcagtttctcagctactggtgtttaattcatagaaatcaatgacgacaagcctagagaggccaccagacaagaggcaatatatgacaaatcaggaagccttgtttgtttccttctaacagtgactctatttgttatattcttcctggtggcatttggcatttcttagctatggattggcagagctggcaactcagaacttctaagaattactatctgcttgccacaatcttcgtattcaaagaaacatgttttattttcttttttcttcctttttttttttttgagactgagtctcactctgtcacccaggctggagtgcagtggcacgatctcagctcactgcaacctccacctcctgggttcaagcgattctcctgcctcagcctcccgagtaggtgggactacaggagcatgccaccacgctcagctaattttttgtatttttaatagagacgggttttcactgtattagccaggatggtcttgatctcctgacctcgtgatccacccaccttgggctcccaaagtgctgggattacaggtgtgagtcaccacgcctggccgcatgttttattttctaaatgtgcattttatgtgactttgctgtaacctggaaaaccccataactttcaaactacagacagttctaactaggattacaaggcaaccaatagatacctggggagttaatactgtgaatttattttgctgtatagttaaaaatcaatctatcacaaccatccaatcatccatccatccatccatccatccatccatccatccatccaatctcatcctttaagctgactagttggccactaaccaaatttataacaatttttttttagtattaaaatacaattcaatgtggagtaaggatgggttactctggatgaagaattaaaggagaaagataaaaaaatgtagctcttacccattttgtagaatacttctgtgggccagtgtgggcagttattaaacccagataacagtgacagatgatatttaaactctctggctctttgtcaaccatctgccctatgactctctttactgagtttatatttcctaggtatttcatttttgaacaaaagacatgcacctcttaataatatgacagagaattggccaacctttccaatacaggacagattctaaatcaaagctattaaatacatgtgtgatttgcttcttgaccactctaaaatatcattgctgctacatcacagtaatacacaaatcattacagaaaaaaatatggcctagtaggtcaaacaacagcaatggcagaaacccagcagagtagaaaaatcaaaggcgatcgagtcaggcagacatggggtcttggctctgtcatttgattgttgtatgcccatgggcaagttattcaccctccttgtggaaggtctagttcattatctgtaagctctggaaagaagtcttcagaataggggtttaagcagataatgcacatgaaggtgcccccaacccccaactgccaaggcatgggcctgtcacatgacaaatggtaactccctttgcttcttttcttctccctaggttatggaggatggtgagcctcgctgacacataaatgactattcctcaaagattttaaataaacaactaggatgcgacctctaaagaaggttaatcccaactgctggccttccactgagaaatcttccctctccaaaaacagacttgtcattatacccactcacagtactctacacttcttcacagcatttatcccacctctggttaattaactaattgtgcaggcaatggattttttctctactaggatttaagtcacccctctagaagtgggcctggcatacaacagtcactccataagttaattgtggactgaatggaacacttgttatagggtttccaacatgtgacatattactgttggtgacatgtgagatgatttaggggataaacatgcatgaactttctgaatagttttagtggttatatatttattctaatgtgtatcagacaaataaataaccggtcaaatctctgatttttatacacagccatgaccctcataataacgttttggtcaacaatgaatgaaccacatatgtgagggtggtcctaaaagattataatgaagctgaatgattcctatctcctagccatcttaacgttattgtagtgcagtgcattactcacttcacatgtctgtggtgatgctggtgtaaacaaacctattgcgctgccagtcatattaaagtatagcacatataattatatacagtacataatatttgctaatacaagactctgttgctggtttatgtatttactatattatacttttatcattattttagagtgtactactacttataaaaagaagttaactgtacaacagtctcagccaggcccttcacgaggtatcctagaagaaggcattgttatcacaggggatgacagttccatgcatgttattgcccctgaagccctcctagtgggacaagaagtggacaggcaagacagtgatattgaccatcctgattctgtgtaggtctgggctaatctgtgtgtttcttagtttttaacaaaaaagtttaaaaagtaaaaaaataaaaaatttaaaaataaaaaagcttatagaatgaggatataaagaaaagattttgtatagatgtataatgtttttgtgtttatttatttattttttttagacacaaggttatctaggctagggtgtagtggcatgatcctagctcactgtcatcttgaactcctgggctccagtgatcctcccacttcagcctccggagtagctagtactacagatgtgtgctaccatgttcagctaattttttattttttgcagagatgggggtctcactatgttgccctggttggtcttgaacttctaaactcaagtgatcctcctgccctggtttcccaaagtgttgggttacagtgagccactgcatctggcttgcttgtgttttaagatgtgtcattacaaaagaatcaaaaagttaaaaaatttaaaaagtttttttttttttttgagacagggcctccttctgttgcccaggctggagtgcagtggtgtgatcttggctcactgcaacctctgcctctcttgggctccagtgatcctcccaactcagtcttccaagtaactggaactacaggcacacaccaccatgtctggttaatttttgtcttttttgtagagacagggtttcgccatgttacccaggctggtctcgaactccagagctcaagcaatccacctgcttcagcctcccaaagtgctggcattacaggcgtgagccactgcacccggccaaaaaatttaaaaagtttatgaagtaaaaatgttacagtaagccaaggttgttattattgaagaaagaaaaatatttttagataaatttagtgtagcctaagtgtacagtgtttataaagtctacagcagtgtacagtaacatcctaggccttcaattcactcaccactcactcactgactcacccagagcaacttccagtcctgcaagccttattcatgataagcattctatataggtaaatcattttttattttttataccatatttctactgtatcttttctatgtttagatacacaaatacttaccattgtgttacaattgcctatggtagtcagtatgataatatgtcatacagattggcagcctaagagcaataagctataccatataacctaggtgtgtagtaggctacaccatctagatttatgtaagtacattcgacaatgttcgcaaaatgacaaaactgtctaacaatgcatttctcagaacataaccctgtcgttaagcaacacatgactgtacttttgtttaggatgaggctaaataaaaaagtaaactgacagagagtagtaaaaaaaacctacgtaaataatagtaccagtctcataagaatatggcaaaaacaatgaaggtgataaagaaaggacaaaatttggtaactactgccttagcatcaagtgggtacccagagtttagaagttcaagacaaccagggcagcacagtgagacccccatctctacaaaaaataaaagatgctaggattccctgatttaggattagcctaaagcaatgaatgagtctgctttaagagcctatggcttgtgaagtctcaactgggtcaatactgaatcaggagtcaagtcagaaccaggtcaagctggtgatggaccccagaactcatctggcataagtaagaagcatgacacatggatatctggggggtatcataggaaataccaaggacacagggtagccaccctaggagggatggtatgattggccttgattcactctcctttcagccttaaaggcatatgaacctggtttctgatactgcttcctccttcaagcaattatttctcaaattactatttttgtgcaaggcttctggagaaagggtactttcttatgtgcacatttgaagtgccaaaggatctctacccaatgtctcacttttccagcaaactgaagcagactgctgccactatcatcaaaggaaccctcccctgagcctccaatatttgagtcctacttctcagtcccaatgctgagatggagagataagtattcctctagtcttggattggaacatagaatgaattttcccacagaagaaaaaattttgatgaattagcacaatgggtgttttgtatatgttccaggtcgtagaggattctgcaagctaggcttggaatccagtgaccacttatcacttcagtggaaaatgcttttaacattttaaaataaaatttgttccacaaatggagattgcctatacagcaaattccttagtagtgaatacttaattctacatatataaaattttatctttcttttaacatcttaaaaaaattgacttttagcatcaatcatgactagtattcaagtctgtaattgttgaaggactctgtctttacagttgagactattctagacacataaagataattccaataagcatttctgtaatcaactcttggctgtaccgagttattcctgcgatgaagtagaatgactgtcttaactcctactctgctctattgacagtaaattattcttggttctaaccataagcctttaacccaatgtcttctacacttgttggatgaaaagaatcgctgaaggtacttttaaaaataagaattcctggccccagcccagtaatgaatcagaatctcaagggagaggcctgggagccagacttttaaagactgcccatccctggtcatactgtcatccaacccaggggttcttatcctggaggctgtattaggatcggaggacttgttgaaacacaggttgctggctcccagcccaagaacttctgaaccaataggtctggggtggggcctgagaatttgcatttccagcaaggtgcctggtgatgctgaggttcctggttcagggaccatactttcaaaatcactaatttagcctgtttggcaaacactgcagctgatttcagtattactttttctccccgctccttgggaaaaaagcaacaccagaatagaacttgcaagcttcctttggactcatacccctgctacttcttagctgcctaatgttagacaaataaatgtaccactccatctcagtttgttcttattggtaggactaagaaaggtagcataaaagaagaggtttgacactatacttggcacatggtatggctgcattaaacatctgtttactctgatctccttgtgatgatctcctatcctatgagccacagatgaatttgctgagtactagcaacagttccaaaaatttgttacatgcacaaaactttgtttggttaaaaccaaccaaacaacaagcaagcaatggctgaccacttcttttccttgtgagctaccatggagctacattttaaagatacaatgggaatatactgtttcctaacttaccttttcccatggaaataaaaatagaaaagaaaaaaaagattagattatgattaggttctctgtttaatttagactaggctgaacttagtacccagatatggattattttcctggcagatctttattatattatttggctatttcttgtgacctgaaaatcaaacaaacgaatcacatgctctcttagagggaacttagagggcatctagcctacgcaccaaccctataaatgctactgaaacatcaccaatgtgtggaggtccagcctcttcttagacacacaatgaaaactcactattctcacaaaccccaatccactcttcagataactgtctaatcattagatttctaccccttttaacaaaaatctttctttttgtaatttctgtatccttggtcttgtttctgtcctctatagtacctgaatatatctaatctctcctgtacacggcagcatttaaagtgctctgaagtagcactgacatccccactgcctattctttttcagcctaaatattgtttttttcaactattctcactatcaaaattccatcaaaaaagttttcatacacttaacagccttggttctcctcctatggataaagtccactttgagatatttcttcactaaaaaaatgcgaaaatatgtgttattttcaccatgtcctatcatcaccagtaaaacaatgtaacttataagaacagtggggtattccttcccaggcagagtttccagaagctgcaagctacagtcatataaaacaacactgtaagcactgagaaggcggtttcaggacaggcttgcaagtggtagcctggggtagatggatctggccatcatgacccctaatgatagaaatgccatgctgccactcaaattcacaaagatccacagtctcttttcaaggaaagcagagtgaaacaaaatgtatttcttactttctacgaaacatttctgcaaatatgcagccaacactccagagatccacgggggtggcgtagctggactggagcaagacttcgggtgctctgtaccacagcgtgacgacctgcaatggcaagcggatccaagtgttactgagaaggtggctgttggcttagactcctgactaaacctggtggtttaatgacaagatgtagttcagaaagaactcctataaatcatataaggacactgcgctagaagcaataggtaaataggactcatcactgacaggccaggaaattacatcatccccacaaactgggttcccacctccaactctatgtctaactaggatggcataataacatgagtttcagaaagcaaagaccaaaaaaattttttttaaacttagaaaccgttttttttctccccccctttaagggcctttaaaaaataatacatggaaaacaggtgatggcaacaattacagctcaatccccaggccagcattattggcagattagaagatgatggcatacagagtggtgtaatggactttggagactcagaaagggggagggtagagaaaggggtgaaggagaaaaaactacatactgggtaaaatgtacactacctgggtgatgggggcactaaaatctcagacttcatcactatacaattcatccatgtaacccaaaaccacttgtaccccaaaagctgtacatatatatatatatatatatatatatacacatacacacacacacacacagacacatacacacacacacacacacacacacacacacacacacacacacacacacacacatatatgaagatggtgccagggctgctggatggtgtccctgaagtctacacaacacccaggacatgtcaaaactgctcttaccgtgacagcttggggaatcaaagtaaaacccctctccatgatgctcttttcagaaaacaagtaaaaagtggggaagaacttaagagagaatgtgtaacccaattgttcatatgatgtgtgaaaaagccaagcagaggaagggattccaaaaagacaagaaactcatttaatacagagcagcgtatagtaatagatgaaacaaacacaacaatttttcctgccaggttgagggctgaagaaagcatatcatgttaaggctgcagatttgagtacatagggggggttcaagtgattccttttgtgggggaaggggcagatagtctatggataccctgggaggtgcattctttattgtcagataaggaattcagaatataaatctattacgtcagaattttatattattcagatcccttttatccttattgttttgtctagttgtattattatggatgtctatctaaattttctaaaattctgctttatatattttgatgctatattacttggtgtgctaagattgcagtagcaagtctcaataaatggcggctgccatcaatttccttctctccttatttgcacacactgttgctcgtatcaagggatggattttattcatcttccattgaatctgagttggccttagtgacttacttgacctacagaatatggtagacgtaatgtctgagactaccaatgttaggtcataagaagcctgagcctaggccttttctcttgagatgctacctcttggaacccagctgtcatgctgtgagaagcccatgaagatgccctggttgacagccccagttgagctctcagctgaaagcctgcgaatgagccatcttggacattcaagccaactgacctcccatataactgcagtcccagacaatgtcacacagagcagaactgccagctgagtccggtcaactgacaagattatgagtgataataaaatgaccgttttaagtctttagatgattatatggcaacatcaaattggaaaaagattcttgacaggttccccctctatatctcatctaacatattttgctttgaattcacacatgggtcaagttttgtttaagtaatactggttgatatctaatggagggatggttgtgatataatagaaataaaaaacaaaacacaaaactgacaatactgaaacaatgttactcaagttaccatttggccccaacatatctttctatcaatgcatcacctcccagagtattttccatcaatgcatcacctcccatagaacttccatagcctttatatcctagtcacatctatactgcaccactggtttttaaccctgcctgttcatcaaaatccccatggggttttagaaaaacttaggtgtataggtcttatcttgtgccactgaattagactttctgtgggctgaactttttgggttggagttttcctcttttgttccttcctttttttttttctttttgagatggagtcttgctctgttgcccaggctggagtgcagtggcatgatctcagctcactgcaacctccgcctcccgggttcaagcaattctcctgcctcagcctcctgagtagctgggactacaggcgcacgccaccacacccggctaattttttttgtattttagtagagacggggtttcaccatgttgctcaggctggtctcgaactcctgagctcaggcaatctgcctgcctcagcctcccaaagtgataagattacaggcatgagccactgcgcctccccctttcttctttttttttttttttgagttcttcaactaatcctcacccttggctatgtttgaacaccactagattatgcaagcatatcccatcgctcttgtctccatgcttttgtttatatcattttcctagcctgggcaactcttctttctcctctccacatatgtaaatttcacctattctacaaggcctagcctagatgccagcaccaccctgttgcagcaccagctgctatctgaaaatcataccttgtaacatagctcataatatggtttgttcctgaggacatggccctgccttaatctatgtttatatctgtaaatgcctatcacagtactgtaaacacaacaataagggcttatacacctatcaaattaatccttttaaggcaatcattcctagaaagataactgggcaaaattcaatgaccagtcatttccaaaagggaaggtattgtttttgctaagaagagtgtccaatactggggtctagttttagttacattacttgtttctgctttattaatatttctagctggaggaacacttctttgcttccctgacacactgtaaacaaaactgcaggtgcaaactgtctgtaaggttccacttgagtggttgacagaaatacacagatatcatgaaggcacacacttatctttctacctcaattcaaaataaagtctagcaacataaaaagaaaagtttaatctgaatacagccttattttaagctgttctaaggaaaatattatttctttcttttttctttttagacagggtcttgctctgttgcccagactggaatgcaatggtgcgatcttggctcactgcaatgtccaccttccaggctgaagcgagtctcgtgtctcagcctcccaggtagctgggactacaggcacacgccaccacacctggctaatatttttgtattttttgtagagatagggtttcaccatgttggccaggctggtcatgaactcctggcctcaggtgatctgcccacctcagcctcccaaaatgctgggattacaggtgtgagccactgtgctcagcaagaaactggtttctgattgattacccatcctaaaaaactttagtaaggctgactgtcttcattttcaatacttcagtcagttatacctattatgataaataaatgtatagacagtcaaaatcataataacaatattgatatgttagggaaattccctctattccttttaaaatttagttaccactcaaaatgtagaatgaatttttatcaaatgctttttaaaatgtctattaataatgaccatataatcatttgcctttgttttattaatgacgtattagttacattaacagatttcccaatattgtagcatccttgccttcttggaataaatcatttctgattgtgtattattcttttaagacactctgaaattctatttgctagtatctattcaggatattgacttatattcataaatgaggctgatctgtagttttcttttttgtgttaatttttcatgttttgttatcagggatattcaagcttccaatctttattatattctggaatagtacaaacaacagaagaataatcagtttcttgagggtcaaacaatctcgctcatagagctgtctggatctttgttagcagtgtgtcttaacggtcttttgaatttcttcttggtaattagtctgctcagctttcaacctctttagaagccaattttcgtaatgataaaggattttcctacgaacattcttaatctagatttaaaaatgtattgacttaaatttgaacatagtatttcttataatcattttaatttcatctgtttccttggttatactgattttctttttcttaatgttgtaaatttttgttttctctttatatctgtcaggtttgtcagaagtttagccatattatttatataaaaaaactgacataattttatttccattttgggaggattattgttttattttataatttgttgatttctatttttatcttttaaaattttctcctaatttctttgttgttgttgagtttttttttgagttaaaatttagctcatttcttttccattttaattaataataaaatgctaactacatatttgtagataaacttttctcatttttgctcatctttaaatactatgtaatttatctttaatttagaaaagtgttttaagatgtccatatggtcaggttatttatggctatctttgaatggttgaatttctacttttattgaattacaacagagactatgatctgtacaatttctacttggtaggatttattgttgttttctttaaaatgatgtatatacttggtttttgttctgggagtgtaatggaagtactgtctttgtaaagttctttattgataagggtttgtcttatataaatccttacttatatttttctatacttcatttgtcaaactctaaaagagagttgagtttctgttttccttcccccagtatctcaaatgcaaacatagataatggtttataaggaatataaatataatctttgaaatacttcagaatctttattttgtcaaagtgaaggttttctaaactgtgctctaatctgtttatttgcatcagagcaatacaaaactttctaatacatatgtttttctccctaaagaaaactagtatggttttgtgaagtgaaaatcaaaactagtgataatttcactgacttttcacagagttgcaaaatttacaactctggtgggcgcttgtagtcccagctactggggagcctgaggcaggagaatggcgtgaacccgggaggcggagcttgcagtgagctgagatcgcgccactgcactccagcctgggcgacagagagactccgtctcaaaaaaaaaaaaaaaagaaagaaaagcgtttccattactttccagttctctatatgatatgacatctactcatcacttcacatttaataagttcaatgaaagctaaaatttagatatctcgtttttatccttaagattttgctctagtctgtgtaaatcattgtaaccaagtgagagtgaaattagactaactttatgcttacactctattttaaactatcaacatctgtctaaagagacatcatttttggttcaatctttgaggaattcaattccaaaagaaagtataaattgttcaagacttacatttctagttaattctctaataaaataaccccatcaatgacctgggcctacatttaaaaataacaaactactgggccaggcgtggtggctcatgcctgtaatcccagcactttgggaggctgaagcaggcggatcacttgaggtcaggagttcaagaccagcttgggcagcatggcgaaaccctgtctctactaaaaataaaaaaaattagccaggtgtggtggcacacgcctgtaatccctgctaatagggaggctgaggcaggagaattgcttgaacctgggaggtggaggttgcagtgagattgtatccctttagtctgggtgaaaagcaagactgtctcaaaaaaaaggaaaacaaactactatattttgcaatagatataaaagaatagcattttctaatagttgtttcctggtttatgtaatattattctatatatcaagagagcatccccagttttaatttgttaatttacttggctgttctataatttctgaaccacagtctttcagtccctacattaagtcactgaaattttaattatctcaaattatgacaacttctgtaatttcataggatttaaaatatctactgcaactaaatctggatccaagtttttgagaacaaattgcaacaaattttcctgacagtaaaatataaattccctttgcttagacattattatacttctgtgcctctaaaaacttctgatggaagactgctgaacttaaaaccagtttaagtcatgcatgagcagaagcttatttttatttgaaagctttataaagaatgaataatatcaataaaattgtttcaaggttttagctcgtgaaagttctcaacaatataatcaattctaccagaagttctgtttaataattctaaatatccttaaaaagaaaatataatggtaaatttaaattttaaaacatgttgaggaaaacaatgagtgcaatatataaagatcaacatttagaaatccgtaacaaaagtcgctactaatggtaacaatgcagttgtctagtaagcaaagacaataggaattatggacagagtttggtgattggagccagctggaaccaaagcaaataccatgtttattacaatcattacatgtattaacagcctctagaggtgctgaatggatgtggcaacaggagggggagcggaaggcaggggggagttcaaggatatttacacaagtggatgtatctgtttaaactgctttgatctctattcacatttttttgaacctgttcaataatagtataagaaaaagtacagccaaggccaactctgacttaaaatacatttcagagtaaaccgctctcacttgatgttatatttaacaatcttttatcatgtaccctttcaccaaggtcttgaaaaaattagatgttatctgattcatcctcattatatggccacaatggcagaaaagcatggtatgaacactgtgctggatgtcttctttttgttgccccagatagtctctgccctagaaatggacctgtatctgccatatgcctccagtttcttactggctttggccaatgggaagtctcggcaggaattcagagagaaggagaagcatgaggtcaggatcctcaactctttgattttcctcccagcaaagctgtctagaactgactgtgttgccaccacaaagtcaatgtccatctcaggaagcctgctctacttgctttcttcctcctggattccagtaactgcttcccctcttcttctagggcctgggaatggtaatgaactgactgcgagtaagactcaggtcatagcaccatcccctgagttcccctaagcccacatctctgcaaatcatgcctgtgtcaagaaatccttgaactacttgagtttgagtgtgccatctatttcctgttgggaccctggctgatacatcctgtttatagatggagaaaccagcgtgggtggcaacttcttctccaagtttcagttttctcatctgttaaagaagatgtttggactgggtaatctataaggtgtcctctgttaacattttaagactccctaaatgatatggcaatggcaatgaagatttaaaaaaacatatatactttatggacccaacaacgttatcgttaaatatctttgctgtcctttggtttagtaattacttatggagtgttccagtgtggtgatattctccttctcgggcccacttcaacaacatgtctcaaatacaaacatagataatggtttatcaggaatataaatataatctttgaaatacttcagaatctttattttgtcaaagtgaaggttttctaaactgtgctctaatctgtttatttgcatcagagcaatataaaactttctaatacatatgtttttctccctatagaaaactagtatggttgtgtgaagtgaaaatcaaaactagtgataatttcactgacttttcacagaggtgcaaaatttacttcttttttttttcgagacagagtgtcactctatagcccaagctggagtgcagtggtgtgatctcggctcactgcaacctcggtctcccgggttcaagtgattctcctgcctcagcttccccagtagttgggattacaggcgtgcaccaccatgcccggctaattttttgtatttttagagacagagtttcgccatgttgcccagactggtctcgaactcctgacctcaagtgatccgccctccttggcctcctaaagtgctgggattacaggtgtgagccatcgtgcccggccataatttagttcttcaaaattacatatttaaatgaagaatattataaagaattggaattctaattctgccaagcacagtcttctcattataacaccttaactggttatggaaactattaagaattaaatactggccaggtgtggtggctcacacctgtaatcccagcactttgggaggctgaggagggcggatgacctgaggttgggagttcgagaccagcctgaccaacatggtgaaaccccgtctctactaaaaatacaaaattagtcgggcatggtggtgcatgcctgtaatcccagctattcaggaggctgaggcaggagaatcgctggaactcaggaggtggaggttgcggtgagccgagatcacaccattgcgctccagcctgggccaacaagagtgaaattccatctcagaaaaaaaaaaaaaaaaaaaaaaaaaaagcattaaatacccataaaataataatggagtcatctcaaattcacccatttgtaatctaagggctagaaggagatgttttgacatatggcaaaaaaatgtctgaggtcaatacaaagatgagagtctcacagcagggagcgctgtgccaataactttgtcctcacctctgctctgatgcatccattaccagcagaagggctgtatttcctcacatctacagctgccttggctcacatggggccactggctccctttagatatgtggatgtcccatcacctgctattgctggtgtggttctctgattctctctctgggattctctttctctgagtctctgcaggtccagatcctacccatctttcaagcctcactcacatattgcttcatccacaaagcctttcctgatctcccagctggaagtaatggctcttctctgagcttccactgcacttctatagtacttgaccctttctatcttgcattatagcttttccatttcttggccacaatacatttacagtgtcatgcatggaaggtgctcagtaattatctgatagctagatacatcaataaccacaggaaactcccagtggcagtgctgaagatggatagaggcaatcacctagactggagaatatgaggacaatactgtcccataataacttaatatctttgagtaatcatgtatctttaacagaggaaatgatcctgtggagggaagagcactacctgattagcttcagagattgtgtaagaagactcacagggcaatgaaaggcacagggaaaatgagctgaatgggtgttccctccaagtagagaggaaaggcatcttgggggaagagagccactcagtaaacaggggggctgtgtactcgtgtcaggggagggatgaaaatgactcactgaaggaccagcaaaggtagaattcagggatccaggtttctgaccttttgtgatatcagtggcacttgccatttcttactgagtcgtacacctctcccccattttatctatgtctaagcagatctacctacaaaaggcctagacagcaagcctttaggtcaaagtaagcttccagtcaattcatcatgtgaatgtctactctgtgaggtaccatgttagtcctggacagtgtggtcgcaaattaggaaagcaatgagttaaatgagttggctgaagtacaactgggttggagggaggggtggtgtctgtgtagcaatttaagtgcagaatgctacggtcctgtcctagtgttcctcctgcctttgtctcttttaaattattgcttaatctaaggcgacatcctcaggcagtcacttttcttacatgaagcacaatccttgtggagcactccatgtgcctgtccccacccccgctccaatccatgctgtattcagaactctgcagtctctgacccacaaatccaactgtctcccggacatcactacttagtgctgctaccagtatctcaaattcaaaatgcatgcattgtcattcctctgaaacttgcttttcctatatttcttctctctgtaagcaaaatcgctacctacccagtttccctacttctcttgactttcaatgaagccaccatcagatcccgacaattccatcgagagcatgtcctctcctggatggtccaaatagcttcctctgtggtcttttcctgccaacatgccccctgccactctgtcttctttactgcatctgaagctgtgctcaccactctcctgcttaaaatccttcatccattctctggagatttcagggtcaagctcaactctaatttacctccaatgctctcataatctggttcccacccactctctgccttcattgtctgttcccccttcagatgaaggctttctttaacttgtcagagaccgtgaggttctttaaacatgtgtgctatgtcgtgcctcatgtggtcttcccataggcccttctctggaatgccctcttcacaaccccattcttaattcctgtgaaccttgccctgcctagtcctccgcaagcataaatgattgcagcacttacattgcatctcaatcattgtatccttacggtctactaggcccaaagccagccctttgagggtagagagtatttctaagtggacttttaatcccagtccctcgcagagtgttgtataaagcaagcataaaataaacatatgttccaacaaatgtatgggtagccagaagacagcagaatggagagttacaggataaggagggataacacagggcaggacagagtgtttctattatagtataaattttataggccatagttgtgtccccatgtccacaccaggcattctgagagtccaccaacatgatctttagtcaacagatgactttttaataaagtgcaaggaccattttatttttgtaaaatgaagttttaaaatgcctgaagggcctatgttttccttcaggctgcactgtttaaatttcctcttgaactcgtgaaacttaaaatagttaccacttattaaacgtctattatgtttaaagtaacaaactcattctctttgtagaagtacagtatagtatagttttgattttgacactaaacaatcatacatttgatctccctctgctttcaccatagaaaccaagcaaatatttgcagacattccttcaaccttcacagataagtagaaatgaaaattattctgaacacaggatatggcaggctgcagggctcattgtttcctcttagaagttgttttaactcttaaggaaatctatttgctttgagaggccacattattactcagatttgtaaaagaatttaaaaattgggtttttccttgctatggaaacagtcaaatgcctctaaggtccgtgccttctttctcattggttactatgctccttttgacacaggttgcaagcaaacctactaaatgagtactagcaggttatatggttagtgcaagtgatgagggaaatggaagcatagttttaaaatccaagttcaggcacacacattcttcaacattttaaaattccatgagcactgccttccttaaatggggaggatttgcagattgtcaggtggaagcagtcatgaaggtatagctcattcagctcattctgcagtacgctctcctcctcaaacactcccatctgaaatgggtcatcgagatgcatgcaggaaaataaaaccagccacaacatttcccagtaatccaggctaccagaaatgaatttatagtctacagaggactgtggtggggggggggtccccactatattttgtgctttaagctattaaaggaaagacataaagaaaatatgcttctgaagattagggtgtttcatgctgttcatttagcaagattaaaactgcaaacagaaaaggaggacacatctgagagaaggacttagattgcagcattaggaatttgtgttagacagaaggaagtattttctgacaataagaactgttaaataccagaatggattactgtggggccttgtaatgttttctcttctctaaaacttttcatttttattttgagtgtaaataagtagggggctacggaaggagagaaaggaaacatttgtaaagcacagaagatgtaatgtactgcgctgaattaactttatctgttgtcttatataatcttcagtttaatggtgtgaggcgagtatcaacgactctatttttacagataaggaagctgagaatcacagaagagccaatggcagaaccaggatctgaagcaggtcttattgaactcaggttcattctcctcactgtggagtctaaatgacctcaggtcttttcttttttggtcttaagcctaattacaataaaaaagtttgtatttccagaatagtcaacatttccatagtaatgcagtttaccagaaaagctgacaaaaacaaaagaagttgtttttctaagataatgggaccccaagggatttcaccaagatagctgccagttgagggatcagggtcatggatgtgcaaatgactgggtcctggatggagggtagggaaggtttgcctacccacaatgttctgcacaggagccagaagtcgggcactgtgtgcacaggcatgtctatgctgttccctagatcccttccctgaagaccaggcatcacccttcctccctaacattttctccttttgtattctatctctgcaaatgagaccaccatctcaccagctgcccatgtcaggctcttcctcaaaatcacccctcacccatttatgcagatgtagtgtaaaaagggtgccttcttgtttacaaaaaaacaaaatgcacagaagactagagctgtggaaataggagagaaggaaaatacacaatttagggaacctaaatactatgacccaccattttctaacacagtcactaagcaacattaaaaaaaatcatattacttgacataagaattctttggttttgaacacagtgcaattgtatggactcgacgacattatctagattttaccatctgatttcaaagttgctaaaaaaaaaggtctaatatgtaatatgtgtcctagccctttatttaatttcctctttcttttataacacagttttgctgtacttactgaattttaaatgtcctcaaaatctaaaattcatttcatatctcttctatgagcagagatgaaagaaaggatcattgaaagggaatatagttctgttgattaaataattacagaatatatacattcatttgctcttaatgagccacaatgcttttcttaaaattgtctcagtttctaggaagaaccacactaataccaaggacttacagagtatttctaggtatatccgctgtcaggagagatacatgtgtgaacataaaaaccagcggaaggcttctcacctagactcagggactcatgctgcatgcgtgttgggggcagtgtggttgctgcatgcaaacactacttgaaaggaaaagtaaccctctgagtttgagtaaaacttggcttctaactcagaactaattcaaagaaacgctatatttccatttataaacatttcaaagaatgttactgctttctagaaacctgtggcaggtagcttcttttatcctggaaactgttagggctttcaaaatggcctaagaaatattccacaaaaattatagcataccattattttgcactaaactcctgcactaggccccaacagactggactaaaagttaaaatggagtcacttatgctcaccaaaccaaaactgggtaaatcaggagagacagagaagtcaaaagagaaagacagcctaatttcccaaacaggccagtttctatcttaaatcagcatgacaatgaagttccctctgttttaatctttacaatagagtaacttgaagtaacctgatgttaagcagttatctattgttctgtctccctgtcccttacatggacgtaactttgaaatgaccaagctgctttccgttcttttgtttctgctttcttctgccccttttctgtctataaagccactctcctttgtttgactaactggaacacttactctattttacagaatgtggtgttgcccatttctagaattgcaataaagccaactgagatctttaaactaaatttgttggaatcacagaagtgatcacagtgatatctaagaaaaacatgtattacatattttaactatcttttagtaactgaaagtacttttttctcatttatgtatttatttatttttgtacatgagtaagttctttagcggtgatttctgattttggtgcacccatcacttgagtagtgtacactgtacccaatgtgtagtcttttatctctcaccctcctcccgccccttccctgaatccccaaagtccactgtatcattcttatgcctttgcatcctcattgcttatgagtgagaacataccatgtttggtttaacgttcctgagttacttcacttagaataatcgtctccaattccatccaggttgctgcaaatgccattattttgctctttttatggctgagtagtatttcattatatatataatgaaatatatatataccacattttctttatccacttgttgactgatgggcatctgggctggttccatatttttgcaattgtgaactgtgctgctataacatgcatgtgcaagtatttttttcgtacaacttattttcctttgggtagatacccaggaatgggattgctagatccaatgatagctctacttttagttctttaaggaatctccacactgttttctatagtgatgtactagtttacattcccaccaacagtgtaaaagtgttcccttttcaccacacctgtgccaacatccatttttttttttattatggccattcttgcaggagtaaggcagtattgcattgtggttttgatttgcatttccctgataattagtgatgttggacattttttcatatatttgttggccatttgtatatcttctttggagaactgtctattcatgtccttagcccactttttcaaaggaatgtttgtggtttttttcttgctgattttgtttgagttccttgtagattctggatattagtcctttgttggaagtatagattgtgaagaaaagtacttttaaatcactattgtagatacttaaaagagaactctgacatatggcaaaaatagaagcagggcctcgtgataccctctgtgaaagtcttccagaatattctgagagacgaagcagattcctactccacactcctgcagtacacctctcttacagcccttgctgacatctggtgtgaccagaagaatctgcttccatctctgttacccccataaaattgaatgctacagtggcagggactggggtttactagctaatctttggatccccaatgcttagtgcaatatctgacacacggcaagcattcaatgactatttgttaaatgtatgaccaagaaaagtatcttttctgataaagaagttcttccaaatttgcccccaaactccaaaaaatgaactctgtccaaagcagcaaatcaaaacaaggaggaaaaaatccatgtgtttgtgtaattctgaaggtatgaaaagtgttctagattaacaactacggcaatagaataaaatttatacataatagcttaaaaaagatttcttgtaaagaataattttggcctctgttggcattggttcatatacatgtataattgcctaaggcatttatttatctatttatactgaggtgtacacaaatcttaacatgttcgatgtatctttacacatgtacacacctatataaacaccactcagaccaacatatagaatacttacatcaccatcaccacagaaggtcctcttgtatttttcctagcaataccattcctgcacccctatttatataaccatagattaatgttgctgctccttgaatttcatataaaggaatcatgtgttttgcttcttttgctcaagataatatgtaaaaactgtgtatgctgttgtagttatcagtatatagttttctccctttcattgctgtgtagtattccattgcatcattatgccagagtttgtttagcaattttttctgttgatggttatttctagtttttggatatagtaaaataaacattctgctttgaacatttttgtacatgtctcttgttggatacaggcatgcatttctcttgggtatatacagggagtaggcaaacgtttagtagatactaccagttttccaagtggttgaaccattttacactcccaccagaaatgtatgagagttacagtttctccgcatcttggccaacagttgatattcccaaccattcgaattagtgtgtagtggtactttctatacttttgactgaataatttgtattctaaaaggataatataatctggatttattaaagcactaactggactttcttggtaatgacagaataaatagtgtctgtcatttgtgactaacattttaaattgtcttaaactactgtgtgactcagtagttcaagacaactgtaaaatattaggctttttttctgacttttgtcccttctatgtcggacttagcaaactcccaactctttaagcatctgtttgtcctcctcttgaggtgtatagactacatatacatcacacacacacacacacacacacacacacacacacacacacacacacacacagagttcttagacaatttaggcattgaaaaagaactgaacttagtattctgaaatgtttgtttgaacattaataatgtaaacattttagaagctgttggatagtagtttttactagatttcttctatggacataattctgaaacatcattatacactaaacatagaaccatatttgtcagtttatagccctgtagcttagttaaggggcaaaccacattccctctaaagaggtcacgcagtcacatttccatttgttgtgagtcttcccattcacccacgcacagaatttaaaaatggggaaccacagcaactattttggcggagggaggctgaaggacaataatcagtgtacacatgctgccattttttccttgtagtttagaaactctgaattagtgtaggaattattttttttaagtcaacaaacatttgcagagtgctacttggtggccaacactcagtgccagtgaattctagggtatggttcttgcccttacaaggctcataggctttacaggtaaacgtgcgtcacaggggttcattgtactgattatttcatcactcaggtgttaagcttaatatccattatttttcctgatcctttccttcttcgcaccctccaccctccaataggccccagtgtatgttgttcccttctatgtgtccacatgttctcatcgtttagctactacttgtaagtgagaacatgcagtatttggttttctgttcctgtgttagtttgctaagggtaatggcctccagctccagccatgtcccagcaaaggacatgatctcatttattttatagctgcatagtattccatggtgtatatgtaccacattttctttatccagtctatcactgatggtcatttgggttgattccaaatacccataaagaaatacatgaatgataaagaaaatgattctttgctattgtgaatagtgctgcaatgaacatgcacgtgcatgtgtctttataatagaatgatttatattcctttgggtatatacccagcaatgggattgctggattgaatggtacttctgtctttaggtctttgaggaattgccacactgtcttctacaaaggctgaactaatttacactcccaccaacaatgtataagcattcctttttctccacaacctcaccagcatctgttatttttgactttttaataatagcaatctgatggtgtgagataatatctcttgtggttttgatttgcatttctctaatgatcagtgatgttgagctttttttcgtgattgttggctgcatgtacgtcttcttttgaaaagtgtctgttcatgtcatttgcccacttttttatcgttttttttccttgtaaatttgtatgtttcttatagatgctccatattagacctttgttggatgcacagtttgcaaaaattttctcccattctgtaggctgtttactcaaaagaaacatgatagtttcttttgctgtgcagaagctctttagtttagttaacttccgtttgtccatttttgcttctgttgcaattgcttttggagtctttgtcatgaaatctttgcctgtgcctatgtcctgaaaggtattgcctaggttgtctttgtgggtttttatagttttgggttttacatttaagtctttaattcaccttgagataatttttgtatataaggaaggggtccagtttcaatcttctgcatatggctagccagttatcccagcactgtttattgaatagggaatcctttccttattgtttgtttttgttaggtttgttaaaaatcagacagttgtaggtgtgcggttttatttctgggctctctattctgttccattggtctatgtgtctgtttttgtaccagtgccatgatgttttggttaccgtagccctgtagtatagtttgaagttgggtagcatgatgcctccagctttgttcaaaaagaaatatttaattcagcatttacaaagctgaatgactttctccccctcacataacatctattaacattctacagaattagtgatccttggaaaacgagttgaaaagcactactctatgacaacgtatggggttgagcacaaataatctaaaataaaatttgaaatatatgtatgcatgtaatttagtaagaaaaataagagctagtatatcttgctttaagcaagcaaaatatatgaaaacctggttttgcattaaaaatgaaagtaaaagttaagaatccttcagggctttggtataaccattatgggagtcaattaccactatatattattacagatgtagatggtgaggacatcttgctatatatctgtattaactatactatttttattagttcagatatgctcacattcaggtagtggcttttctgaataaatatcttatttactttcaattactttttcacgataaaagtagagtgcagaacaaattctaattacttatactttctggctgtctgtacagcaaatgagaagacatttattgtagtataatgttgaagttcatcaataattactgggcaatcaacctaccaagacagaagctgagactataaagacaaataacatatcatgtctgtcctggaagagttcatagtcaagctaggcaaatgtaaaaagaaataactgtaatactgtgtggctggaagtataataaggcattgagaaagtgctacagaaacacagatgacttcattaaacagaatgggtgatttattgctcctacaatgaagtacacacacaatgtctatgtacaataaaaatatgactgcaatcaagaaactaatatttattgagcacctattacatattgtaaatgtgcatgccagaatttcttaattatcaaatcactgttagtttcatagaatttcatattgttctcaaaaggaatataaaatatttcttagatttttgggcaattttattattcagaatcagagggagccaaacaaaagtttaattttacattttagaaaaaagtctaaggcaataccatcatatgcaagcaatccctcagattggtaatcagaactatatagattacacgtgctttcatttcacagttagagccagcagagggagtaaacctcttcaaagaaaagactgaagtatatatggagaaatgtaagacttcagatgtaaagaatgcctttgataaaaaagaaaatttgagtactgagacacagatgtcaaatacagggaagtactttaactgtacttttaaaactcattaaatgtaagcgtaaaagcaagagcaaccactgagtaaactgaaggatgccatcttattgctttaaagagacccacaggactgaaaagtattaactttcccatatgaaagccctgtaggctgggcgcggtggctcacgctggtaatcccagcactttgggaggccgaggtgggcggatcatctgaagtcaggagttcaaaaccagcctgaccaacatggggaaactccatctctattaaaatacaaaattagccaggcatggtggcacatgcctgtaatcccagttatttgggaggctgaggcaggagaattgcttgaacccaggaggcagaggttgtggtgagtcgagatcacaccattgcactccagcctgaacaagagtgaaactccgtctcaaaaaagaaagaaagaaagaaagaaagttctgtaaaatgtgttctgtagcaaaatctgactgattggcattaacaggaaggaatttcaatagtccatgtgctaattagcaagagctactatctgatgagtgcctgttttactccaaagataagtccatatacaccaatcacagtaccttgctgcctgaatttctaaggctatgaaactgctacctatgaagagtatgaaaattatcttgggctgggcacagcggctcatgcctgtaatccagcactttgggaggccgaggtgggcagactgcttgagcccaggagttcgagaccagcctgggcaacatggcaaaaccctgcctctactaaaaatacaaaaaattagctgggtgtggtggtgcgtgcccgtggtcccggctactctggaggctgaggtgggaaaatcacctgagcctgtgaagtcgaggctgtagtgagccgtgatcatcatgccactgcactccagcctgaattatggagtaagactgtgtctcaaaaataaaaaacaaaaaacaaaaacaactaccttaggaacacaaattccttgtgaatattacaataaattcattttttaacagaactacacaggactaagcctttctttgattttcctcgtgtagaagaaaaaattgagagagaaaaattttctgaatgaaaaccaagtatttttactcactttcatctctggtacatccacaatattttttcatctttgctcttcacggggtacttcttgtacccttctcagttggtatttttaccatatttggttcacctaccaaacaaactataaacataatctgcatagtggaaaattattaataggaatgtctgttttgcacaggcccaaactctcttttttgcaggttactattttccctgtcttttgtttacctgtgaacctataacatgtataaataggaggtatttgtttttcttacctgggttaagagaaagagatacaagtagagaaagaaatgggggtgcctaggcttgagaataactggatatgggctgagttcacagagaaaccctgatcagcactccctcccagccctatgtgatcctgtctcatatgccacaagttctttcaaaagctctattacctagtagcaaagtgggctggcgtgatctagaaggtgactctcaggaccaactggtaggtttatttttccattttattatctgttttctaatttattcatttatgctttaaacttttcctgcatcctagtttatacaggtatattctaattaattcatcattatatactttaacatgttttaatttttcataatgagtaatatgtaaatacaatcgatgcttgttgaaaagaattctttttcttttgtgctacttggattgaaggcttttacatttacagtcaatctttcttttccagtcataaaagcagttagtgctatgaattagcctctgtgaatagctttggtcatattgtcagctttgatgtagagttcactgttgtcatgtgaagtcactgttacacattaaataggcaagagaaaagggggattttacagattgtgagaagtttatagtgaaattggagtatggcaagttgataagctgaatggttgaaatgtcagttaccaggtacccttgggaataagtaaagaccaagaccccatgttgcctcatgctcagtgtacaaaacgtctgttcataatcatttatgtggtcatctacttgctgaagatgatctaaatatcggccatttattagtctcatctttagtcatctgtgaacaccacacagtatagggggtatgtgactagatggactaagggaaagagtccttgattgagattttgaaatctgagtttttgttccagatatactctggatattagttttaaataaatatttatatccagatatacctctggatattagttataaataacctttgtatatttattactttgcaaaaaagtaattttatattgttaggccctagtttctcaactacaaaatcaagaagtcacatttgattatttctaaagtctttccaactccagaatcctataattagaataaataaattctacatgctcagtgacaccatctgaacattgcactgtgtaccaatacatccaggtcagtgatgctgttcacagaaacttgacatttacagaaatcaaactttaaccaagaggaaaactgaaagaacattaataattactcaatataatttgtgattccataaagcaaaattggaattccagaagagcctgtgaagaacctttaagagttatttagcctgagtggcaaaaggcaaagccacatatcacttatcaatgtagctacaggctagagaacaatcatgtctgcatgtcatgtaacatgggagaggctgttgtctgtctcgtgttcttttcagaatcaagcatcattgttcaaacagaaatgtgtagtgattgcgcttcattaggtaagcatccaaatttattacaaaatatgctcagagtggccatttcagaagacatgtctgtctctgaaatagaaaattatatatatataaaaagaccacagcaaaaaggaatgacatgggatataatttttctgttcctacctattgaaatatatctctggttcgtgtctttagaaattaccaaagagaaaaagatgatctcaaatgactgaaattacttatagacagaaggatattaacctcctacgacatattaaaaagtttgggagggagaaatttaagctacacatgatatctctggaaattccattctgtttcatgcaaatgatcagtgaaagttataatgatacaaagttatgtcaataatagacttttaaagaaccaggtataaatggcagtgtaaatatacaaatcatcttggtttcttttaaatattaccaaacaaatatgatcctaggactaaggcagaaattagggggaaaaagtctcatagcttctttgttggtgattaagggaccctgaggtaaaaaaaaaaaaaagaaagaaagaaagaaagaaaaaaaccaacaaaaatcaagaagcaatgctcaaggtaataagtgctttcatgtttccagttctcatatctgagggcactggatcaagctaaaggacaaagagataaggacaatattgcaagttacaaacaaatggcagataaaagagctcttctgggttctgattaagtgacagcattctacacattcttttgacttgagaaagtcagactaagagcagcggctaagttccatgtgaagccccgctaaataagcgtatctgcatgctttcacattctggcaggacaggattcctcccctttcattgaacagagacatgttctctgggctcacagcaataatgcgcctctgcttcaacttccataaaaaagcataaatgtatatgctgaaagcacagagaagttttgtgctttgggacgaggtggctgggagccaatgtttacaatcccctgggtggggaaggcaggctgaaaggctcaggacggcaggctttaaaagtctttgctgttgccgccagtgaccttcgcctctgttttcaaagcagctctcacgttaaccccttggattctgtgtgcactggagctgcacaaaggaaatacctttctttgaaggacacctctctcacgcacatcggtttctgatttcagttggagcagctcagaaacactggattaagaaagaagcatgtattcaatctgctgtcagacccacggacatgtcagcggtattggatctgggtttcggagtgtgctctgttgtacaaagtgaaagtttccagctttaggcaatggactcaaggttataaaccaggggattgtgaaacatgagcatatttggtctccaggggagaaggaagcatccaatttatgcagaaatgctcttttcccagctagccaatgagaggcgaggctacaagagtgggcttcctattgggatctcctgactagaagaatggtgcttaaaattaaagacaggctaaattgctaacaggccaacttaaaaagcagctgaagagaaaacaccaattgtaaaaatgaaaagggagttttcccgttatgaaatcaaagctgaccacatttagcttattattatatgttgttgtttcacggggaaagaattaataatcttttattcttaatgctaagaagatcctacaaaatcttaccatatatgtgtatttttttaatagtctttactaagttactcaaatgatgatattcaagagtggtattatttaaggcctcaaaatgttttcaggacacaagatttactttgaaaaaactggtttgatatgtcagggaccagatcaaatgatttactttgaaaaaactggttcgatatgtcagggactagaacaaacgctttggtctatgagaaattttgtggatttaaagatgtttgtcatctaaacattgatcatcatggacagtgtcacccctttattgaatggacagcatatggaatcctggggtcatgaattgtgcaattctaatattcagagtctatgaactcctaacacatttcctgtcttcaagaggattaagatttctggagaagaaaatgaaaagcaacatacaccagaaaatttaaccgattcgcaaaaaagtcattaagtcttactaaaatcatccaatcaaatatgagacaggaatgagagagagaattttctcttcacatttggagatgaagcctggcctctacgttaccaggcagccatctataatgtcacaaagtacatgtatactatagctggaagtcatcttaggaatatttgagagaactgtttttcaggactaataattggctcttaataagtgcttcggaagacagttaataacatttcagcttctcgaagaatgcttaatagtaatcataactatcggcctggctttcattacagaccaaacaacctgttccttgttatctattgtggaagtcaatggtgattaagtaaatatattttactctaatgcagaaactgactagaaggaatgttttgagaagctcaaagaaaccccagagctgcacaacagagaagacatagccaaagaaaaacagtcgaagtttatcaagagtcttccgtacgcctggcacttcactaaggacttcacacattttatgttacttaaacataaaaacttgtgagataggcacataattttttacccatattttaggtaagatactgatattcaaacatgttaataactacagtagtcccacaactagccacttgtcagagatacaatccaaacccaggtctaactccagagtctgcaagtaaccactgagtatgacaaccatgcaggcagacagccctctaccactgcagagaagcccccgggaaacatatttcacagctctaaccaattggtgtacattgcaattactattttattggggactccaaggcatgtcaatcttttaagaaggaggctgtgttcagttggagatttttcatcgtattactgaattaaaagtcacatatgacttctatcagaggtgaagaagctgcaatacttggtttctgcaatagatttactaacatttatatattaatttcacattttaaatggaatctaaaagtagcagatgaaattatgctatcacaaattttcatgttttacaagccagttggaaaatgttttattcacaggctacaggatccatattctcatcattcccagtctgggcccctcactcctacccaaagcttttaagatgttgtttcttatttgtctccataaatgaatcttgtcttaaaaaaaaaactgctgtgaaatcaaagaaaataattgttgccatcttttacagtaatgacatgtcacttaaaaagttttcagcttagactccgttttctgaagcagcttctatgaactaataacctaacagctctccatgaactttaattattgcaatagaattattaggcaccaccagttacaactgaactcctccacacacagtataaagttaaaactgtacaaatgaagccaaaatatgcacagctaaaaggaatgttacaggggggcctctcttagcgaacaaagcaagctcagtttggctctttttccctcgcgctaccacatccgcacatcgttagctggaaaattcctgatatatgctgtaattttttgtgcttttttttcccccagtacacttgaggctttaatgtccagatgccattttcccccttatctgtccctgtttggggttctgccagctatggtcaacaattaatacagccgaagaaaaaatacagtacgctccctggcaactggtacagccttgcaggaaataccaaataaaaacttgattatgtattgtttaaccattttgtttgcctgtaggccaccctgtcgtcggtgtaattcagacgagcatgcttcatctggacggtctgtgcactgcaccattgttcccagagtctgtcacgcacaatcactggcttcagcctgtggccctctaaatgaaaggagcagatttgtggcagctttccaacctgcattccttttaattagtcaacttgtggcccaatgttataatagataagtaacctcttaatattcatgtaattaatttatttttttctcattcagttataagcctttgcatggtggaaaaaaggctttttcctatatgggctctggcttatgaaataagcatgctactattataaagaacatcagagaccatgtctcaatgattctccaggaggacaattccagaaaccacagtatgcccataactatattttaagcatattatttttgcatttaaaatagtaactgatatcttccttttgcatgaatttgatgtatgtaagatgaatcatcttgccaacttcaactgggctgataaattttaactaataacttagttcactatcagagagacagaaagctttcacattttaggatcccttttaaagcaaggctgacatgaaaagtggccaggagttcccaaagtactaggaagtcctctactctagacctcgattaagtcaataattaaactgctgatgctgttagctattagcacatgatgaacctttaaaaagataagttgatttctataaatactaataatgcctcttggtaacaggaatcagaatggcttctaaaagctccatatttaagttctttcaactatttacatttttctactaaaccaaattctcctcaaaggcagtaacatcatttttacttatttcatgtcctcatggacaatacacatggtgggtgaaatacagatatatctgtactactctcacatattcttagtagcacttctcatgagatttatgagacatttacaatgtcacatcaacaattaattcattcattcatacatatacaaatgtgcctactaggtgacaagcattggatctcagttgcaaagatgacacacagatgatgaagtcatcatatctgttctcaaaagctcacagctgagcagaggaggcagacatgtaacttaccaattgcacaagctctgtgcgaggtagacgtaaataatttaaaagcctggattcaaatcctgtctcctcttttatgagctacatcaccttggctaaatagcttaacctctccatgcctctgtttcctcacctgcaagatggagaatcatagtacctgcttaatagggcaactggagaattatatggataaggtacataaagtactctgcaggtgcctggctctataaactttagctatcagcaaatgttatatacacatcaactccacaggggtgaggcggggtgcaggataggggtatctagtgttagaggcttcagcgaggaggggcaagggcatgactggtagagagagcaacatgagcaaaagttgaggagtatgaaactgcatggaccagataacaggaccccaagtgttacttgacagagctaggactttatcctgaggagaaggggaggtactaaagggttttatgcagggcgtgtatgtcagatatgcattattctacatttgcattctggtaactgtgtaggattgaaattggagatgatcctgaaggcagggatctcaatgaaaaggctgcaatgatccagatgctctgggaggaagatgtataaaaccacagcagtaggagaggaaaggcaggaagaataactttaaacgagtcaaatgaaggagaaagaaagattaactgaatctaggataagtcccaggtttctggcctgggtggccaggtagatggtgaggccatcagcctgaatagggacccagaagggaatgactggaaggcttgctacttaggatgatattcagaaagatatttgggtctggggctcaagggagtggaccgagttggacatacatgagttccctgcctccaggattacctccacagcggaggagactgttgaaggagatagcatgtacaggctatgtgccatagggcaggacctttgaggaaggcagaggtgggcaatcagtggagaggagtgagagacgtggaaggaaaagcaggataccacgatgtcacagaagtcaaggtggatatttacaagaaataacgaatagagaagcatgcatgtacccgaagatgccaaacaaggtgaggtctttagaatatccactgcggtaacatgatggcagcagaaggctgcctgcacaaaattgaagggttaatgacatccagagtgaagtccttagttacagaagaaaagaggcagacgacagagacaactgaagctgctctctctgcctaccatgcctttcccacttgcctctaactctgcccagaacctctggcccctttaaggcttctttggaaaatagtgggtacagactgtgcttgaaggcatgggggcagcaaagacatgatggaaccaggatccggagaggatcaaagtggatgggatcaagcgcccaggtagtgagattagaagagcactgactccaaggctacagactcagaagtgaagatgagcacagaaaaatatagattaatttgcaagtatatgttgtagagatgcactgatggaattcacattcaaaggtttattcacttgattaaaatacaaacaatattatcattaacaggggcaatctctggtttgtgaagtctaaagcttacacacttttttttttttttgagacggagtctcgctctgtcgcccaggctggagtgtagtggtgcgatctccactcactgcaagctccgcctcccgggttcaggccattctcctgcctcagcctcccgagtagctgggactacaggcgcctgcaaccacacccggctaattttttgtatttttagtagagacaggatttcaccgtgttagccaggacggtctcgatctcctaaccttgtgatccgcccgcctgggcctcccaaagtgctgggattacaggtgtgagccaccgcgcccagccaaaaaaaatatggaatgcttcacgaatttgcgtgtcatccttgcgcaggggccatgctaatcttctctgtatcgttctaattttagtacatgtgctgccgaagcgagcacctcacacacttttaaaaagctgacaaataccacaaaatgcagaaataaaatcacaatattttgattaataaacggacacctccactaggaaactcacttgccctgtgttatttttgagcacatactcgttgactgtctttcatctgacagcaatttttgaaatattttctacaggaagataacatggttgatcaaagattatttttatcaacagctgtgatgcagaaaacatgtcacttcacatgtgatcactgttggtggtagtgctacaggttttagccataatcaaatagaatattgataaaatctattttggctgattcttataaggctgattctttccttatagaagaaaaattgcatggttatttctatcattaaatatgttgcattatcaagtatattcttttttttttttttttttttttttttttttgagacagagtcttactctgtcgcccaggctggagtgcagtggcatgatctcggctcacttcaacctctgcctcctgggttcaagtgattgtcctgtcttagcctcccgagtagctgggattacaggtgtgtaccaccatgcccagctaatttttgtatttttggtaaagacgggatttcgccatgttggccaggctggtcttgaactcctgagctcagatgatccacctgcctcggccccctaatgtgctgggattacaggcatgagctaccatggtcagcctcaaatatattttcttattatgaaaaaacttccatcttaactaggcattgatgagaatagaaacatttgctttcaaggtacatgtctgttgccttgaagaattctcctcagactagcctttggctcagtatgtttcaaaccttgtttctcctccactacccacagactttggtgccagagaccataggacatggtcatattgtgaaatgacctctgaatcccaggtaagtcagcacagtgctggtggaagtgaattcctggaggccatttctacacgggggtagccaggcataactatgttaaggggtttctcaatctgggcacttttggcatttggagccaggcaattctctactgcagggggctgtcctgtgtattgtaggatgtttaatggtatccctaggcttccatccactggatgtcagtagcaacatccctctcccccatattgtaacaacccaaaatgtctccaggcatcgatgagtgtcccctgggggataaaatcatccctaatcgagacccactgatatatatgtaaccagtgaaccccatatagagcttataaaacccaaatgaactcaacatccccttagccagatctcaaaaatgcccatggtcactccattgccacctgacacgagaactgtgatgggtgaggtggaaggttaatcagctgcatttaaaatagctcacctccacaattaaaaaaaaaaacaccagatgaccatattgctagagcctctcccataaccttggtatgcgatgggagctgaaagtgaggagctctgaagcttaaaactcattagacacagataaatccacttctgatcataattttagtcataagcaatgacatatttttaaaaattctctttttatactgcataactaatgatatgacatgtttcatacacatactgcaaatctcaagataggtaaaaatacatttcaaatgacctcattaatcattataatatgacctatggttaagtaaagcacaaaacaagtattctcaattctctagataaacatcacatgttttatgacatgaatgtgttatataaaagaatatctgtgtgttatgtatgcaagcaactaaaattttaacatttcatttatctggtaagatgaatgaagacttagatgtaactagatttcctggattacttacatttctctttgtaagctctgcaagtgtattattttaatcacttgaattttttcttgcttgtgtcttattatcaattgcctttttcctgctgttatgatccctatgtttatcagcctaactccttttctagtttctgcttctaatatggacctattacacttcaaaatgaattcaaacacatttatcaggtcccccacagaggggcctcagactacctccctgatctcagccctgacctctctccttcctacttactctgcctcagctgcactgaccttcttgctttccttggacagaccaaactccctcctaccttggggcctctgaattcactgctccctgtgactagaatgctctcctgaatcttaggatgctctgtccctatctcctacgcaaaagaccttctttgaccaccctccccctctaaaatagattcccggtgtatcgcactctattgcactgctgggccccagagattttatctaatatattaatttgtttatcatacaccttcctgacaagaatgaggggagattttatatatatcattaatttctacactctcagctcagtgactggccagcagaaactatagcaaaacttgaagaaattttaaataagagtatggatctaaataagaactcaagaggtagacataaggctttaatgatgtgatagctacttgggtgctcagagccctcctctctcttttgttcttctgtatttctaattctattcccttgcttctttacttctctttacccccacaggcaaccactatcctaagtctcatgtttttcatttccttccttaaaaaatgttaatctataaatatacctaaataatatttagatttgctttatacatatttcatatgctttataactttcttcatttttgttttattcccctcaatattattgctaatattcatccatgttattgcctgtagctatagctcattcatttttaaattttcactgctgtgtaattctattgtgggaatataccagtgtcaatttaatcattcctttgtatatgaacagttgggttgtttggagtgttggtattacaaacaatgctgcagagtattcctgaatatgactcttggtacacatgtgcaggaatttctctaaggtatgtaacttaaggcatggaattgcagggtttcatggtataagcatgttaaactgtatagttaataccaaattattttctaaagtagagtatcattttatgttcccttcaacagaggatcagttttaggtgtttcttgaaaaagcaaagacttggttttagagaaatattttaaaaatctaatctaacattctttgccatcgaactggtgagttttgtccatttacatttactgtgattaagaatctgtttggacatttttaccaatctatgtactcgacattctttcttgcatctcgggcattccttttgagattattttctttctttttgaagtacatcctttagaaaattcttggtagtggtaaactctcttggtttttgcttctgtgaaaatttctttacctcattagtatactgtgtacttagaattccatatatacacaaaatagtaacaaaatatccagaatatccaaagtatttttactacgatgtccttcaggcaccaagagaggaagcatataacaagtagttgttcaccaagtaaccaaccttctcctacgttttgggtccatgctaaggcatgcttagcaaacacaaatcattgttcctggtctcaaagagctttgagcagcattaaaaaaacttggaaatcacatgaaacctaagtagagagtgaaaggtttcatgtaaaggatgaattgggtggcttaagaagtgctgtgggcattcagagcaggaagcatccaaagaaaggtggatcccagtcaggtcatgttgcagaagctcctgaattatgtttctacacaacactacttatgtggccaaaccacacctttaccttgaatctgaaaaaagccagggtacgttttctttggagatggtactgtggcttaactgaatcctgaattgggcactagatagataagagcaatattaagacaaatgttcttaaagactaaattagagaataagcaattgtatgaaatgctaaatacaaattttccagaattgcaggttgaatgtgctactcagttattagtctaggtaccaactccttttctgaatggggggcattcctgcatggctttgtaaaacaaaacaagacagtgcaggttatacaagggctgggctgaaagcctcaggaatttcttttaactttcttgaaaggttaatagctgaaagagttcttatatgacacatcttaagcagactatgtgaaagaagtgtatgttatctgtgacattaattcctaatccatagtacaatgagtcacttattcactggagaataatctaacctatttgggaaatgaacctttctgaatattaactaccacctattcccaagaggaagtgatcggtggaatacaaaatggctcagtacagaaataacattaaaatgctcattttggccagcgtggtggctcacacctgtaatcccagaactttgggaggccaaagtgggaggatggccttgagcccaggaggctgagactgcacagtgagctgtgtttgtaccactgcattccagcttggacaaaacagtgagaccctgtctttttaaaaaagctaattttgactacagtagggaaagaaatttactttcataattaatgagctgttactttccagtcatctgccttccactctatagagattaaatacacaaaatgtccttcgtgaaaaacaattttcttgtctttgtagaatttgtcctgtgggtggtaaagaagaaaagcacaaccatgaaggtctgtgctccagggccacaactcaatttttctgtgccatcctcaactacttgcctagtggttgaaagtaagcaaggaacaaagactgaagaaacaccactggatttctgggactctgagatctcacactgagatatggtgcctgaaagcaaagcaattaatactgcctatacagtccattcacaataacacactgattcattcttagattctcagtgaaaattctgcaactgtctggatttgtgcattcaatttcctgtattcgaagaatagatacgtgtgtagccttggaaaaaatacattttatttttccccagacttcaacattgtttaaataactgataatggaaagatttcttcagcataatcatttcaggaataccagaaacactctctcttttgagaaataataatgaaaaaagagagaatggtctccctaagatgttagtaatctaaactttagtaaaagtgatttctaagtaactgattaacagtaataaaatggtttcattggtttatattcatttctttacctgtcttcatattcaggttcaaagatgagtattactattacataatttaattataggacttcactttttcatgtattaactcatttaattcccacaacaatcctattaagataggtactgtcattttctctattttagcagagaagaaacccaggatacagagaggctaaagaacttatttaaggtcacacagcttgttaagttgcaaaataactttgtataaaagatctggttccagaatacgtccctttaaccatgtactgtggtattatactgtgtataatagccgttatactgctttttgaaggaagcaatgtttttcaaaaaaattatctctttgcctatatttgaaaatggtaggagagaaaaagtaatattccaggaacacttgaatcaattcaagacttcagaaacaatgttgccaagaaggaagtgagaaacaagggaagaaattctaaaacaacatcaatggagtcactgtttaaagaaaagaaaggacttattctcttggaagggtgtgaactatttattcacaaatacctgatgagatatagaaaacgtgcgtgcatgcgcacacacacactcacagtctctttctctctcacaagataaataaatgtagtattagaaagaatgctaggtatataatgttttaaattctgctgtcttcccagactcttccaacttaacaatctctggcctcaagaacatgacattattctcttaagagaaacagccattatcaagtgtatgatattatgggcagcagatgagcagatggaggaagacacacagtggtgatgatgaaatttttaggcatatttagttgtttaaaaaatcctcaaactgaacagactcttactggattatatccaatatctaatttctaaacttgttattctttaggaatagtgagggaagacgggtgaatgaaggtaattagccccaaggagagaaaaatcgaaaaagggctgaaaaaaaatttgacgcttttctttactaatttacaactttctttgaaaccccagtttgattatctgacttttgaaattgagaaactaatctgtgttaccattttagagaaatgaatggatgaggtgaaccaagaatggagaatggagataaaccaagaccacacaaatttgactataatgagtatatattacttttataatagacataaacagcttcaaagtgcatcatcattaccaattgctatttggtgagcataatctatgtgacgcccgtttcttccctcaaggtgcttgttgtctaaggaaaaaagtaaattatggtattttgtggctgtttacattacataaccctcattagggtttagtcatataacgaccacaagtgaggtatacaatttgccaactttagcaaaatctggattatgtggaggaaaaaggagaaacagaaagataggtggctaattaattagaacataaccatgtcactggcactttaggcccaataaagtaaaacatctatcatttaagtcctgataaaaagaaatatattttttaaaaggctctgtttgtaaaagaaaaaaaagtcatttcatgatagattcatctgaattacaattgggataaacattaaaccactagaaaatttctgatttatacaactactagtgagatgtcatatagagattcttcattatacaatttgttccgttttgaatgaaaatgttaatcataccaggagaaattactatacatattcaataccactgccagtaaaaatagtagtgattacatcagtagtggctactatgttctgagcatgtgtcaggacacatccacaacagtacagtatgaaggcaattatgaccagagacacttatttgatttaaataaatatatttttatttcttatttatctcataaagtaaatttcatatcagattttgacatgaacatgttttccccggatctacatttaacagcctccagtttctgtcccatctcattcttgctctcacgtagcccctcgtcacacatctttcttaaaacagcctccacgctggtttccctgccatcaatttcttaattcacaccaaatcctccctaccaatccactcatcacattgtagtagactgcttttttttagggtaaaaaaggttttaaagcactctgctcaacaacccacatacttcttgctgctttgccgttgtgtgtgtgaacatgagctgatgtttctcaaccccatacctagaacacacctttccctgtgctttgccaggcaaactcctcctcacttgtaagcctgcctcaaaaattagctcccctgagaagccttccctgactctcctagatctaacaatgcttgtctcctagattcaccagggtttatctggctaggtaagagttgtagaggcaacttcagatttacatatacatatatgtaactaaaaaaacatacacatatatacatatatgtattttatttatgcatccaaatactgaatattacttttaatcatatgaatatattaataacaaacatactatttatgtaatataaattacgtaaataatattaatgaaattcacatctttttaaaagttcttagtttaacataatttttcttattgcctcactgtttttaaaagcaatccttagcttcctgaatttgcctgagaagaatgttacctgctgattgctgatagatggctcatactcaaaaagtgtttgctgattgctattattaaggaatctaaggaatcatagtcctggtgggtgtggtaagcaatcattcttagtctaatcaacatttccatgaaactctaaagctttctgctttcaacatatgtggagcacgtaaggaaaaatgcactgtgctttataaaacattttattagagattggtgaatatatcagtgcgcctctgaaagaaaccaacagcagatgttcctacctatacagtggccctgctgccttggtgggggtgtatctctagactaatgaagggcctgtacattcgttgttcacccaacagccatcccctgctttcctggctagcataacctgattttcttttgggtagcaatatgcttatctacagactgattggtcaatgggtaggtacgggattcaattatgagtgatgaaacctaaagtggaagtttgaaaagagcttttggaaaagattgtcttccctgattaaagagacaataaaaccctttttggcccctgcttcctcacctactgcttagaatactgttgtatgtgatataatgcttttgaagttgtggcagccatcttgaggccctgagggatgacactctcaactaaccaaagaagaaggaatggtattttcccaatattcggttatcggaaccaagatgataccatcaagcaacagcaccaattgcagaattacctatctccagacttcttatatcagatttaaacgttattattattcaagacactttgattggatattttgtacttgtaactaaatatatgatgctataaatgggtccagaaaaaaatctgaagattctagctttggtgattaccagtaatgaagttaaacaaaggagaccaaagcagaattgcctaggaaaggagaagctgatgagtgatctttttgttatgatctgtttctactgccatggaacaccagatggagaggtggggaaaagcagagatgagggctgatactcagaggagacccgggcagacggatgacttggacacctctgcacggagatgaaagttacagccatggacctgagtcagacacagaaagggctgaagtcagaacatgctggatgctttattagaggacaggaagagcagaaagcgccagcaaaggcaatggccagaggcactcaggagagacaaagcagtgagctctctcacattcagttaaggagtgcaggagtaggagctgaaacccttttggagaacaatttggcattatcaaatttttgaatgtgcattctttgtcctttgtcctggtagtaccatttcttaaataattatcctaaaagaaattagtatttcagtgaaaaaaacataagcccaaagatgttcactgcagccaaaaaatgagaaaccacccaagtgttcatcctgggagactgggtaaaaatattatgtaaatttacacagtgaaagtaagaaaaagaataacaggctaatatatgttagatatggacaaaatgcctaggataaataaatggaaacaagtaaacaagaaatcccaaacaaacagaaaacctgtatgtatactattataggcacatccacatccaccctcatgcacacccatactgagggttgtatacaagtagcaaaaaatataaaagttcatttaacaaactgttaatagtggctttttttctggaaggaaggatcattgaggattttcccttttcatttttttacctacctggaatggtcaaatttttttttttttttttttttttttttttttaagatagagtgtctatctgtcacccaggctggagtgcagtggcatgatctctcagctcactgcaacctctacctcctgggctcaagcgatcttcccacctcagcctcccaagtagctgggactacaggcacataccaccatgcctggctaatttttttattttttgtagagacaaggttttatcatgttgcccaggttggtctcaaactcctgggtgcaagcaatctgcccgcctcagcctcccaaagtggtggaattacatgcgttaaccaccacactggtggaatgttcaaattttaaaataattttagcaatgaacaaagaatgcagacaaaaaaactgaagaaggaaccgtgacactttgggaggctgaggcgggcagatcacgaggtcaggagatcgagaccatcttggctaacacggtgaacccttgtctctactaaaaatacaaaaaattagcctcctactcaggaggctgaggcaggagaatgctgtgaacccgggaggcagagcttgcagtgagccgagagagcgccactgcagtctggtctgggtgaaagagcaagactccgtcccaaaaaaaaaaaaagaaccatgagagtttaagggagcggggactcgcatatacaaatgctacaaagggaatgtggaagaacctgcaaaaaatgccactggatttggtgaactctatcttataaatggggctatttctctctaaaaaattgtctactaagaccaaatttctaaaaacaaaattactgagtaaatgcatgtgaattaaaaataaagcaattgatgaatatcttatttttctaaaatattatgggactaacaatacttgagaactacaatcgactattgaaaaaatttgatgcctttaaaaacaggagtacaaaaattacaaatgataagctgatggaaaatacaaattgtactgtgcatatagtagcagcaacatgacctttaaatgcagtttttcagccccacatcctaaaaccaagaagtcgttatagaaataaagatagaacaataaatacaaagaaaagataaagacaagattttatttcaacttgtgtaaaattgctgaggtcactcttgaaagcttttcttactttaaatggactattcaatcttgtcaaaatcttaaatattgtgctacatttttaacatctacttgccaataaaaggcatgacagtggacagtttgggtataagaacatgtgagtttctctcttctttagacattaatcctatgtatgtatgtatgtatgtatgtatgtatgtatgtatgtatgtatttatttatttgagatggagtctcactctgttgcccaggctggagtgatcttggctcactgcaacctccgcctcctgggttcaagcgattctcctgccccagcctgtagctgggactacaggaatgcgccaccacacctggctaatttttgtattttttcagtagagacggggtttcaccatattggccaggctgctctcgaactcctgacctcatgatctgcctgcttcagcctcccaaagtgctaggattacaggtgtgagccactgcgcccggttgacattaacactttacaattcacaatgggctatctgtggcttttcctaatacaatatttttgaatgtatatcaagtaaaaactacagtggccagacagtataagtagttttacataatatacataaacctgtaaagtcttttaaaatgcatcttaatctagtaaatcatattttaaatgcataggcagcttttgaaaaactttgccaaagcccatatgcaaattacttgattttacatatttgatttttaaaacatttatgcagttttattaaagctatattggttttttgaacccaagatttggtttctattacaactccattaaaaatgttccctgacttaaattaatattgataaattagtcatttaacattaaaagtggttatgattagaatgagtatcactgattaagcttccatttactctgttgctctgtactgaaagctgaagaaatataactttaaataccaagtcaatttgttttaagtcctcaaaatttaaaaaaagtaaaaaaaaaaaaaaaaaaaaagaactagtatcactgagatcttgtgcactcttgacaatatccaaccagctgactagtcatgcatttgtgtaaaatgcagtaactttggttttccagaatatcttctaaatataaacacaagattttagcaatgaaagtgactaacaaaataagtttaattcttggtgtttaaatttcaagatggatgcagatacaaaccacaatggcacctttcagggaagtcaatatttaaagaacagcatcccttcccaacctcagtcctcctctacctcctctactcagaaacctcctattttaccacccacatatactctataaacactcactgagcagctaccatgtgcctgtgtgttgttacctgaagtgctgaaatggctattttgcaatgttaatcttttaaaaatagaagacagaagtcaaacaaatggggatactaccatatgagaactactatattacaggcaaatcaaaagtgcacgggagggtaggtacttaactttatcctggggagttgggcagacttcagagatggcatctgagtcttgaagaatgagtaggagattgttaggctgggaatgggaaaggcaatctaagcagagagaatgtttagtgacacggaagcataaaatctaatggcatgatttttcaagaaggagcaaaaaggtctggatagcaagatcatagggtgtgtggagatgggtttggtgtgggtgggaaagcaagaatggagagaaaggttaggaacagttgactgctgcattccggagctcagagtatacagacttgagtgtgtgggcaatggggagtcactgggaatttttactccttcacctccccaaacgggcttgtttcccacagtggtccatgttgtatggctgttcccacagctcccttctacatgccagtcttgtctttccaggaaaaagaaaatctccttttctgactaactgtagtcttgatctttcatccattctgcaaaaatgggattttatagacaggtaaggacattctcatgaatatatgtgaagaccatcattttaggaatttatttcacattcttgatagtagcttttaaatgctttactttataaaagttttacagtttttttttttctttttctaatctgctttttctaaactagtaaaagctagttttctggaactaggttacagacagactttggcccatttaacaaggtcagactgtttattcttgacagaattctttcccactgtaaaaaggtacttttaaatgccacattccaaaaccagtgccagtaagccactgaagcatattttcccacaagaactgataccatgtgcagtccctacctcactgaaatcatccagcgttacataaggtgcagatagtatttaacgtcaccatgaaatctatcaactgaaatatgccagccatgtatttataaaacacttccgtacatttcaaagcattggtaacatttaaaaaagtaattattaaaaatcgaaatgggaaaaaagaaagggaaggacagtgctagaaattttttaaaaagaatttaagacagaagaggaaaatgaatcttgtaactttatatcagtatccaaacctgaagtagtagagctttttctcccttattttggggtttttatggttgagctgttaaatttacagccccatttttagattctgccagccttcaaaataaatatatgagcagcgctaaagtaaattctcctacgctttccccttttctcttttggatgtttccctgagatttgaaggtagattattcctccacagccaacagtaaagttcaacattcaaatttatgaaggatttaaaaatcatcagtatccttgtagatagatgctgggtgcaacaatgtcactcaccctgggtttcaatccctagagagggggaaagcagaaagcaggagcaataagaggaatggttcagcagccaaagactatcatttagaaatgcattgggaagattagcaataaagtcaataaatgcatcagaaaatccggcactacaaagtaattgtataaaagtctgagctcaacttttggagagacctacacagataacaggatcataaatttaatcttctcaaggacccaaatggactagataaaatgactaagggaaactgcaatgcagagattttcaaccccttcttgggacactatggtttctccaaagatcccaagggatcttagctttaaaataaaagcataacatacagaacatctaagtgcacaagtcaggagatctggcaaggtttgtgatctcaaataaagagggatgaagcacaataattatctgaaggttatgaatggctgcccagacacacattcaaagtgtaaatgttactccctcagagctcaagttattatcaaggagtgacgcaggcaattgggaagattagttgaaagttgtgtctaaaacaaattaaaaaaatttttttggatgcttataattgatgatgcaatgacacaagcagcaacatggagaatgcagagtaggaaatccattcattgattcatttgtaaaagcagggagttgtgaaagcaattaagttcaaagaatagtgaaaaactgataaagaatatgtgcttatgttatgtgcttaccactttgggtagaagcgatggaaagacagaaaggtaggttggagctgagcttcaaaaaactttgtatgccatgctgtagagttacagttcattctctaggcactggagaatcgtaaggattcattcattcattcaccatgtactcaagtgcccacctcgtgcaaggaaggcactgtaggaaatgctaaaatacattatttggactgagtgaataaaaatggatatggccaatgttacagaatttgagaaacattatcttgactcagaaacttacactatgatattatcaaagcctaagcaaaatattgccacctctcctttccttaaaaggaagcagtgacagctctaaaatacaagcagctcacgtgtccaaagaattaaagaggacacaaaaatccaaattattgaaatgttgctttatattcaattccaaggaccatgtctcatactcctatgagtatgaatataacacttgcgttgagttaagcaaatttaggggagatggaattatctcattaaatagaactcttcagagaagcccctaaactagcacagaggcatattcccaaaaatgttaaatgtaggaggcaaaatgttttttcatcttctggatccctgagaagccctttacttgaaaaactttctgaagcatatggtctcattaatcttaagacaatgcttagtctttatatccagtttggcctcaggcttttgagattttgaatggcatcatatagggtgtccgtatgaaaaacaggcccaggcatggtagctcatgtctgtaatctcagcactttgggaggctgagacaagaggattgcttgaggaatttgagatcagcctgggcaacataatgagacccccatctcttaaaaaaaaaaagaacgtagctgggcgtggtggtgtgaacctgtagtcctactacttgggaggctgaggcaggaggatggcttgagcccaggagttggagcctgcactaagctatgactgtgccattgcactctagcctggacgacacagcaagacctggtcaaggaaaggaaaggggaaaggaaagggaaaggggaaggagaaggggaaaggaaaggaaaaaggaaggaaggaaggaagggagggagggagggaaggaagaaaggaagggaaaggaaagaagaaagaaagaaaaagaaagaaagaaagaaaagaaagaaaagaaaagaaaaagaaagaaagaaaagaaaaagaaagaaagaaagacagacaaccagattctctgtatcataccctgatagatgctggctgaacaaatgtaggaaaaaagcaaggaacttctggctctttctccgagtaaaacatcctccaggcagtagcattacagttgaactgtttttgtccagaactaattcgcaacagtgaccacttatgaaggagctagaattaggtgagtcaaatgaatgactatcttttataaacaagggaatcagtcatttgattcacttcgcaaatccacttggtgcaattagatagccacatgcatgcacatgcaccaacagcagctttctgtgcagtatggaatacattctctttctacatggcagaaattctcacagtggtcatcgatatttgccttcaccgtggaggcagagctaacctatcagatggtaactcaaatgtgttttattaccactgagaacgcgcagtggagaatctggatgggttttcatgtttgttttggctctggcattttccatgtacccagccctgggaatcctaaagaaaacgtgtcctgttcccagctctgtgcactgcccccattgtgttccacttccctcactggtgaaagtgaaaacgaaaccggcacaaaccctccattgttaactatgaaatatgtactggcaactggatgttttaacaaaacagacctggttgtgtcatggcaagatgttgagaggggaaggagtcacaggagcccttcctgcttcagaggtgtgtcctgcactttcgctgaggtgccgaggcgacggggctttgggttttttccattatactcatgtaatgttcttggtttgatttattcagtatgcactggcagcttttggaggcttctgtgggagctactcggctgcccaagccgaggcacaaaccctgccaggtctccatagtaaatacaacacgcacgaagaggaaacaagcataaacaatttattttctcctgtaaaagatgacattgttctccgatctctggtcctgcttcactttgtcacttggtggtgccaactgggtgccgtggaatgagttattccaaacacacacacacaccccaagcacgaattgcatgacgcgcacattcacagggcccacatccaggcgcgttcaacaggaggatgctggtgacctctttaagcatcccacattttgacctgggtaaggagggagggcttccctggcccttagcctaggcaggttcttgagccttatcatatggcctcataaaaccatatccctttcctttattgcatttatctctgtttctaactagacatttctttgtgtgactatctgattcagatctatctctccatctcgcttgtaagctctctgaccttgtccatttccattcaccatcatccctcagcttcactgacagcgtctgcacatagaaagtgatcagtaattatttgttgactgaaagccacaactccatttcattgattttctcccctaggcttatcaaagtttctgaatccacgaggttccgttagtgttactaaatgctatcaacactgaggtcagagtaaggaaggaatatcatcagaggcacaggaaggggatgtaagtaatttttttttcttcaactttaagttccagggtacatgtgcaggatgtacaggtttgttacataggtaaacgtgtgccatggtggtcagctacacagaccatcccatcacctgggtatcaagtccagtattcattagctattcttcctgatgctttccctggcaatttttgtaatacttctggtattaaataagttaatgatctcaaataaagcaatattgggaatcttatcagttacagatttaaaaaaaaatttccaaaattaagttttgtactttgtacagctgtcgaataaaagtcttctcatgtttaacatttacttgttgtctttttgtaatttctatggaataaagggtgttttcagaacatgtatatcttttattagtgaaggtaatatggaaaaaaagattcttggagaaagagaatataattcacttagtgagaattttattaagtcactaaaaagatgggaacatactcccactcttccattatggtacaaagaggaatgtttctctaaactatacaggtgtgtttggcacaggcatttgaaggaaaaatgctaacttcatgaatagcattaaatgattgtataaaggccccaaaaatacaaagatactgaggtaccaaaaagaatgacctcattttagggtacacttctctctacccacggatggctttatgatggctgtcctggggagtggctggctctaactgcctgggtgttggcaatcacctgtggtataaaaacatcaatactggcattgccttgggtggtccttacagtattcccatgtacactgagagcagcacaatgaatgtgctgttgcaattatggacttgggtgattttaagggagaggacacagataggactgaatcaagagaatgcttcatttttcctaagcaatgatacttttataagacattcaggtgcacaatgtggcaaaagttttattgaggtctacataaaaaaagaaaaccaggaggcaccagttcatgacccagtgttcctcactgtgtcaaaatgtggcatgagctagttgtctgtttttggttttattattttaacaagacttaaaaaatattctttaaaaatggactcctaaacatttgtggaacctctaaataccctttgtagaatctgagagttccacagaacacagtttgataccctcttgggtactgaatttttggtatggagaaaagaggagtggggatagtgggccagagccagaatataaacattagaattctccaagccatttacaatctatttggtaaattcagacttaagctggtcacactgcctgtttgaatggcagtttccccacttttcaaaatgaaatggttgataaagagttccaagagcaccaaatccaatggcaacaatatcaccctccaagctgtatgattaggtttagaaaaaaaattaaagattttgcatcataaatgggaagacaagactgctcccttcctgagcttgctggtcacagtgcttcatgactgtcagagccctcaccagggctgctgatgatgttcctggctctgctctaagacatgtcagacccgggtgcacagtgaggtaggactgaaattgctggctgagtggctggtctctttttcccttatcttcacaaaaataagttgcaccatgcactacatttcacatgagaaggacttagaaatgttgacttcagagtgactctaaatatagtttcagctagtcacaacagtcattgtaccgaacaggtgtatattcttgaaacacttttgccagagacattatataacttcacatgtcatgatttttacctatcagctatgtacaatggaaagaacttccctgtaacctgttctcattggttttccaatgagaacaaatgtaatagttcaatagaggtcagagaagttaatttttcatggtttcagagaaacttttctgataaaaataacccatgccaggtgttaaatataacaggccccacttctcttcacatttccaactccttctttgaaccacaaggggcctcatacacatgcttacggacactccagtctgcaagtccaagctctgcccatatgctgcaaacagctgcccctaggcttaggagtgaacacacaagtggcaaaatccctattaggaggaaggatgagcccatgcccttcccatttagtcagggaattgcaatgtcctgtgtgcggtatggggcaggggtggaggtctcaagagacatgcttccttggcaccctgggttgtgtgctccatgaagggagacaaggctggagtagggccagtgtaggcttctctaaagcatgagatccaggtcaggggcccctcttgcctaggaccaaggcaaacactgttaccatccacatcttaattctacaacctttaaagaaaaaggtataatactctgtatgggtacatgtgcatacaagacactatattgagcagcaagaacccaataccccataaagacaccagaatgtcatgttggaggcagcctggcaaagttaggcaaaagacatttaactctttgattagtcctcaatttatcagatgaggacaagataagtcattcagcccgatgttgcataccacctacagctacaactatggtccaggctactgtcctaaattaatttctaccaaaggccaacatatgaagtatattctacttatgaaactcgtgtttcttaacaagaaacttgttttcactagaaaaataaaataataaagatcataatataaagggttataccttaagatgcctggaaagcttacctgtctagaacaactaatttctcaattaatccaaaagatgccttgtcttgaatactggcatagagcatactggctcagaaattaaggagaagtagtacttcaggatctgtcaggtgatcatgaacttaaaatgaaaataaatactgttaactgctccctcaaagttctatatgtaagaacattttgaagttttcagaaagaagctaataatacaagcttttataattgttcaaatagaaatatcatttattatgtaaatatatatatattaacatagatagtaaaagttgtctagtaattcacccattctttcatttagaggatgttaattatcttagaagaatatgactcctcttctaaaacttgctttaataacaaaacacaaggggctaaagaaagtcttcaaataagtaaaattacaataatgctacattcctctatctctacagctttctgttcaggacaggaagttcaattcatatatgtaatttgttcctgaggcagtagaaaggattatgataaaaacaatacacagactgtgaacttgggtttgcgtcaacttttcactcctaacttgagattgagctacagcatgtattaatagctttcatgattttgaacacagatatgtgctgccaataaatcaatcaggactagggtgcaaaatggactcagccattttaaggtatatggagtaagtccttcagcttaatattaccaggtagctatgaggaatattgacacacatcaaatgagaccattaaatgtataacatagctccttctctattcctgttatgactcaactgcttatatctgcaagtcagcatttgtcaatttattcactgaaaaatatttcctgagtgcctatcaaaataaacaaggcactgtgtgttagggctgaataagatgagcatctgccttcgaggaacttatggcctgataaataaaattcccaaataactaaaaacaagacagaaaacagtattataggctgggcacagtggcttatgcctgtaatcccagcactttgggaggctgaggaggacggattacttgaggtcaggagttcaaaaccagcctggccaacatggcaaaaccctgcctctactaaaaatacaaaaattagcctggggtggcctgtaatcccagctacttgggaggctgagacacgagaatcgcttgaactcggagggcagaggttgcagtgagctgagatagggccactgccctccagcctgggcaacagagtgaaactctgtctcaaaaacaaaaacaaacaaaaaaacccaaaatattactctggaaacagagaggaaaaagaaattaatttctgaaggggatactagaaagggtacctctggagtcaggctttgcaaggtaagtaaaatactagcatttctcatagttttaagatgtcagttttgaatcagttaacttgtaattcctttaacattccacaaattaagttgattctcagttcctgtatgacataacccactaaaaaatgtgtatttccaggaagaggagtgtagtctttttctcttcaagagacactaaaaatacataccagttcagtctaaaaaactatgattccaagtttttatgtcaccatgtgtatataaatcgacgcattactatattaaatgggtatttcctttaaatagaaaaatacaaaagagtggggaaattttaaaatgcagtaccctgtaggaacataccctttattattaccattaaattccaaccgtcactctttccaataaagtctgatttttgttttagaatccttctcagctgctaacatgttttacttatgtcactataggaaatataaagcatgcagtataaactagatactgaaaaattgtgtatttatgactgcctttctccttttcctctatgaaataatttgtctacattttcctgtttgaacatatcaactttcagcaagaatggaatgttaattgatgttacgcacaagctcaaatttaataagcaaaaaaaaaaaaaaaaaatcaaacacaaaccaactgggtttcctgtttttatttatggttattagtgcccatttggggggattaaaataaaagcgtccatctcagttacagcttatccttccttcaattaacgtacccaaggagacaagttccttccatctactcccctgatgactctctggatcacaaagcctattcaagcttctccccagggccccaaaacaacatgcgcaacaacttcctagggaaactcaaagcctacctcacccttcccactggggaaatacacagactcagccctttctggtgtgattacataagaatacaagggcttgcttgaccgtgctcaaagctgaggcctatcttttaaacatcaactcgtgccatttctcctctaaagcaatggtgtatgctgggcaaagaggaaatgagtaggatttatcttctaacaatggcaacattttccaaggaatcctctgcatcaaaagttctgatgccctaggaaaagtctataatgtttggaaagtaactggtcttacgtgtctaggtggtagcacccctattttgactgggggcagggggtggggaacacttttataaattggattttttcctaaggcaagttatctgtctcagagaatttctaactcctctcttgaatttctacttatcagctgtagtattactgaaatttagggaaacaattttttgctgtgcagaatgaccaaagatgttgccaatcattacttaacaacagggccatgctgtccctgatgtgagaaccactttgaggctaaagatggacaatacggattatttttttttatttctttgaatatacaaagatattttcttttttaaaattctttttcttaagacttaatttgctatatattatttatttaatttactgtacgtaaggcatgaatttactgtatgcaaaacaggtctttcaaagagaagggtattaatacctatttccaggctgctctttttgtatttggggtgcagaatttcacaaaaatccatctgagaaataatgaactatatggagaaatagaagctaaccaatgtcaatagctattatggttttgcagctgaatggcaaaaagaaacagggtatcataactgttattttttgccaaaacagggccgttgggttcgctctttctattcagggttatatgagccttcacctggcatggcggtgctctacgttcatgcatcatccaagttcactgtgaatttgatttcttctttacagctggcaccatagcttcagatgagtgcattaacaaacctgtgtaggcactctgtttctcaaaaccatgatgctgcagacaggtcaacgttgctcgtgctctttcttccctgaccttgagctgtgtgttccctaggcattgtacatacagctctgaaaacagtggttatggcagaaagcatttggaaacttgtaactgattcctgtccagtggctaagatgcaacaggctatttctgcaatggatcctgtccacaacaagcccaggctggatgtgactgtagctgtaagcagaatgctttctgcctacccactgccatataaaaatgggcaaagacattctatccaccaactagtcatgggcagtactaacattagagacatggaagagggacagactgtcattcaaaataggaaaaataagtttaataaaaggacagcactctctcactcaccactgaggttagagccatctggaaactatagatgcgggcaaggccgaagtcagcgagttttatttgtccgctgctggtcaccagaatgttctgtggttttagatcgcgatgcactactcggtgtgaatgaagaaagtccagacctcggagaagctgaaacatcatatcctaataaaattaaaaaaagaaaatcagtaaacactcaaaacggaagttgagcatttgctatgctggacgccgaatccttagcattttgtggctgcttggcatgcggcaggcatttgacaggtattggctgaatgagtgaattgtctcccttcctgcctttccactcccacactttcaagaacactgcaaaaaatttcactctcaacctgtattttattaatgaaaggacaattttaaaatagtttttgatggaataggaaacattctggaaggatatctgccaaactggtttcagtggctcatgctggggagaggaaggaggaggtcgtgaggggacactttttgcttctctattgtttaatgtgccatttcaacaattaaaatccagtgaataataatattgttattaatggtgattattattttatagcacctagtactaaacactcactatatatcaagcactattctaagcattgtccacttagtaaataatttaatccacaccacaacatttaggtaaataatatcattacaccattttacaggtcaagaaactgatacacagatgtaggctactaattagcccaaagtcatactagcaagagagtgctgattaactgtttgtttttttttaaacaggatcttgctctgttgcccaggctggagtgcagtgctgtgatcacggctccctgcagacttgacttccttggctcaagagatcctcctgcctcagcctcccaagtagctgggaccacaggtgcatgccaccatgctaggctaatgtttttagtttttgcagagatgcgatctcactatgttgcccaggctggtctcaaactcttgggctcaagctattctcctgcctcagcctcccaaagtgctgggattacaggtgtgagccaccatgcccagtcttaatcaactgttttagaatattaacagagtcttgatttaaactagggtctggaaaacctcgattcaaatctccaatgtattcctttatcaaatcaatgaacaaatgaatacgtaaaataaggcaagccatttaacctctctaaggcttagtttccctgtctgtaaaatgggacagtaacaaagcccactttatcataggatcattgtaaagcacttagcaccatagttaatattcagtaaatggcagcgcttattactgttattattaaccagtatggaggagcggatcattcaggatataaaccaatatcagatctttttctaattttaggaccaatacaaatatacacaagatttaatactcagggacagtgtctgaaggtaggaactaagacattggccatgatgtcataatcctctgaaatgtgtggaaattaagagtgacctactcccctgacccaaatattataagaatggtgtatacaagggaggatggagctgttttgttaatacaagggttagaaaaatgactgggtaccaccatggatttcagagctggaaggggctgtgaggatacacttatcattggccggaccactgaatcctctcatcgagaacagtatatttggttactggtttatggttttggttcttcctttagagttcggagttctgtctttatattttagcttgttcaaaaccaaagccttagtttttccttttataaagtggagaaagtagcgattacttttcctactattaagggggctaaatgaagtaatgtatgccaagtgcttgtacagtttctggcatatggtaagcacttgacaaacagtaattattaggatgattattgccaagataagtgtcctgatttctgggggagactgattcacaaacaactaaaagaaaacatgaccactgctacaaggtcggtgtgaacaaagcacttagagggggtatgcagtgatctagaatcatttctgagatccccctgagtgaatattctgaactggcaggggtgaccttctaagcttcccaaaaccctggagaagactgcattggggaggaaaagcccttcaagacttgagaagcactgcaggtccaataagttgtaatgaataaacaggagtgtgaaaatgtagcacaaaatgttcaaggaacattttggcaaataagtctttattggaaacacatgcacacaacttgtaagcactgaattttaaaaagcatgactaacctaaagtaatgtcctgttggctcatcatctttagcctctatacagttaagtgtcactcatttaaaacagtataaagaataaatctgtttggttcatgctgcagtgttcaaacaactttagcagccaattagcagtatacaaatttaaaaacatgcacatcgtttttatttgtgttataacacacactatgtttttcttaattataaaattgctaagatgtatagatgcatgcttaatgcagaaactaataaaatgttttaagaatccagagaagaagaaaaatcactaaaaaattccactacttggagaacagagaaaacttcactgttaatataactttttttgtgtctttttagtctgtcttttaaaaattacgtattttattatatttggatgtataagtatatttaagtaaaagtggttattattctgtacacattattttgtagctcttttaaaaacatgtaacaattcattatcaacattttgccactaataaaattctgcaatatgactttttttatacaatgagatttttaatggctgcatggtttttcaccctgggacatgccataattattattattcagttttagttgtgttactttggcacttatactacaggtctagttcttgtttgtttaaaggtagagtagattaaaagggcttgttaatatcataccaaagcatgggttaggcagtatgaatccacatgactgcactaacgttgattccatgtgtatgatgcctatagatgtaagttggttctacataagaatgaccattctttagattttattaggctacttaaattttttttttgtttagcaaatggcttttcttttaaatctccaatatctagacacaattggaattctgaaccaatgaacactgagttaacgacttaaaaaacaaaatcttgcccaacatctcatgaccttcagtaattcaaccacgagttaggttgttgggcattgtgaacctgtaataagcatgactggggaacccctctcagtctttagccaacctttattgcaatacctaatttcaaaggtgaagtacattcagctacgtcaggaactctggtcccaaataatcataagatatagtcccaattccagaggattatataaataaataaattacaacattaaatgaggtaagaaaaaaacacctttcctacagaatcacaagaagtgttttcatcaaagacatttcaaaggactctctacgtaagcttatgatctgttctatctcagtttatagtatcgtgaggcatactcttaaattagctcaagattttaatctaaattattctgtaccatatatgactcaaatatttcacagtaaccctagtgatgcaatgcaatgaaactacagataccaccaattaaggctctttcagttaaacgcaggtttaaaagtttccctttttatgttatacggcacagtctggtataaaaagtttgaacatttagtcatacttatgataaacagtcacttgggaccctcactctatctttttaaaacatgcgactcgcaagcatgtttcaacaggacaccattgtggaatgaagtctggctccgagagatcttaggtggggctttatcttggcaatgcccctaaaaagactctggacctttctgaatacaagaaatccttgaagtcttgtaattgtttctcttaggtgttccagagctctaatcctcttatttaaaatcaagacaaacaagcaaactaaaaaacgacttcaggcttttctaatgggaaaaggttgatcatggggccttcttttctttttcttttctttttagaggcagggtcttgctctgccacccaggctggagtgcagtggtgccatcatatcatagctcactgcaacctctaattcctaggttcaaacaatactcctgagtagctgggactacaggtgtgtgttaccatgcctggctactttttaaactttttgtagagacagggtcttgctatgttgcccaggctggtcttgaattcctggcctcgagccatgaatccttccgccttggcctcccaaagtgctgcaattacaggtgtgagccactgcacctggcctgggccttattttctcattacaagaaagtatgattatttccaaaagacactaaaaacacccaagtcatatcataagtcacagaatgacaactttaaatagacaattctggatatagggatatatcttgtgatatattcacatcctcaaagttttagcaccaaaaatgtataatcctcagtttatttaaaaattaaaaacaggacatatccaacttgtaggcaaagataatctatttttctccttatactctgtaaacctcagtcttttcaaatttgttattcaagttttcacagaactctctccatagtggtttgtctgtttcctatgaagtgtgttagaggaggccacagactaaaatgtatcacatataacaaaggttttttaacactaaaccaataagaacatgttgaattaaggtgagggttacgattatagcaacagagggaaaggtcacctgagcctgcatataacttctctcgcatgtctccccatgtacccctcccctcagtccttgacagccaccattctattttctgtttctatgaatctgacaactctacatacctcatacatgtggaatcacactggatttgtctttttgtgagtggctcgcctcagttaacatagttcctttaaggttcattcatgttgtggtgtgtatcataatttccttcctctttaaggttaaataatattccattgtatgtatatatgacattttgtttatctggtgatccatagatgggcacctcagtagtttccactttttggctgctgtgaatattgctgctatgaacacaggtgtagaatgatctctttgtgactctgctttcaatttttttggatatatactcagaagtggaattgctggatctattcccagaatgttttaaaaccatggttctcccataaaatgtggtatattgttgctacctaagcaatgaaatagtgactaacagcatcgtgttaaggtcctaaagcgttagccaagtggcttgattcactccttggagattccacccacttttgtctgcattctgggagaatctacactgcaggtccccacatcaagcttgctgtatgtatacagcttctactctatttcaaaacctgacagggttcccgtgtgctttcattgatcaatttgcaatgagcaatgaacaatgagcttcaaaggctgtttataaacaggtctcccctacttctcactgtggtcctcaggaggacccaaagaatgcttcatccaaaatcacaaagaacaagacaaacaaattctgagaaaccaagaggagggttcaagaggattccttaaaacttccatatcacctggaaagttgtaatgggtgaattcaaagcaagccattaactggcaagctaaaagagtcacacatgagctttgttccacagcaaagcatagtccagcaatgccatagtacccgtctctttgccactgtgcatgatgagtcaggcacacatcacctcgaggcccctcaggagaaacaaaggcatgggccctaaatggaaacactggcttctaatttttactgcttctaggcaactggataaaagtgtaataaagtggcattgcatgtaaattttaataatcaaatatgtattctgaaatgagaacagaacccactttttattcattcctggaagtgatgataatgctgagaaggtaaagaatcagtctcaactaactggaaataaaaaaaaaaaagataataagtcatttccaccaagcctgaaaatgttggtgtttgaggaacaatgtaatgacttaaatgaacaacatgaaagaataaatcattacctcatcataatggctatttttaacccactgtggaaaatcatcaggaactgaaactgcaaatatgcaatgctaaacataatttcttcagagcaggagataaaaatcagcactgggtaaagaagtaagaaaacatgaagcccaagttcctaggttgttgggtaatgacccaagtggctatcattctatacacattgttttgtgaggcttttaaaaacattttacaatgtgctgtgaatatttccccatttcaacacacacttttctataatgaaattttaggccaggtgtggtggcccacacctgtaatcctagcactttgggtggctgaggtgggaggatcacttgagaccaggagtttgagaccagcctggacaacacagggagaccctgtctctacaaaaaacaaaaaattagttgggcatggtggctcatgcctgtggacccagctactcgggaggcctaggtgggaagatcacttgagcctgggaggttgaggctgcagtgagccgtgattgcaccactgcaccccagcctgggcgacagctctcaaaaacagaagaagaaattttaataagctttctaatggctgcaattggacaaaatactttcttatctttccacattcttcctctcaattccctcttttgagaattttcccctcactctgtacttccttcctcttcaaatgaggtaatgcttagaggagctggttttccacaagagtagaacagataattatttgtgtgatatagaagatactgctggttgtcagccatgaagacctggtccaggccaatgaaggcaatcacatttccttttgctaggaattgatccagggatgaacatgacacccagtcctgtatgggcaaattggctagagagtttcaggaagcattttcctccttgataagaggtgcacagtagaatgctctctgctgtacttcctcatctcccattcctcacccacgtcttatactgaatgctaccgagctgtagcaaccatcttgaaacatcatctgtacacataaaaggccagagtgtaaacagggaaagagtctgggtctttgatgacatcaatgaatagctgcatcaactttagggctgtctgcctccagccttgtagttatgtatataataatgcccttatctggatccacttttcattgagtgttctgtaatttgcagctgaaaattattctaacaaatctaacttaattaaaattatattaacttaaatatgttatgaacattatctttcatttatagccaccatgattcaccccagggtgaggtacagacccaatggggcctgtaccaacattcttttcctgttggcaatcatccctttcaggtggttatccttttctctttgaggtgtgtacctccttccattaatgtttataatatcgcctttgccatcactatcatttactgtcaactctctatattccccaggaaccatggctcatcctgtttaccccacactcaacgtcttcctgcaggactccaacatcactaggatgcccagctaatattagcttcagaactttgacttctttaacctcatcccatttttgccatctacataatactcatgcagatggttagtctctgttttctaaatggaatgcgaatgcatacaattttgtaactgtctttttcacatcatgctgtatactgaactcatttgcatgtagatctattggcaatgtagatctacagcttaatttttaatggttctatatttttctatttttatttatattctatgattagcaaaagggtttaagcagtcattaaattacccaccaattttaaatgccactatttctcatgttctaaattacttgaagttattttctggacttttgctctttgtttctggctctgtttagagtacctctctcctttaattattaaatatttagagtaaattttaacatctgcagggaaagttttctctttccactctttataaaacattcctgaatattttttgaaaataaaaatatgtatttatttatttttagaggctggtctatgttacccaggttggcctcaaattcctggcctcaagttattttcccacctcagcctgccaagtagctgggactacaggtgtgcaccatcgtgtctggcattcttggatattcttatatgttatgattatgaactgacttcagaatcattttattgagtgcccacaccttccaaaaatccttttagtattttcaatgatttttaaaaattgataaattgatttggggataacagatacctttacaatattgagtctttccttttcttcatttactcaagtcttgttctgggctcctcagtaaagtcgtgtctttttaaatacaattcctacacctctgaggctcccactatagcgggtctggtccgccttctccttcctcacatataccattacctagcctttccccactgatctcagtcctcaaatccatcttgtactctctgtctagactgaacccttaaaagtgtaaacctgatcctatcagataattctcctgcttcagccccctcagccaaagcccacctagctctctggccctgcctcctggtactctgtggatttctgccatctttactcatttactgccccatggccccaactcctggcagggtcctgcttaaattgctcttcctctagatttattggcctcccaccacattgtactaatgggtgtcaataaatgctcaatgagttttcataaagaagtgagggcccaaacaaaactaaaaatgaccatgaaatctatgaaggccattagcttaaaaagaactcactgactccttttaggaggaatgcgataaaactccaggggaatcagaaagagcaggtttggattacgggatagggacaaaagaggcatggcatataaatcagtattcgtaccttttagccattaaaacatgttcatatgtgttgagactttgggctcattattttagaaatataaaactcccatgactataatgaacactgacacactgaacaaaaacaatgaaggatgcttcctatcttaccatctctttcagaagcaacttgcccaggggtcaagagacatggatttcagcacattgttccacagcttggggtaggactagcttaagtaccttatcctctcccatctctaagagaagtattccacagatcaaatcactttgcctgagtcttcacttggatgcagaattggactattggccaaatcccctaatactactttaatttcatatgatcatatcagagtttctcaaagtacagtctcttactccagtgttactaagttccgttcaactcagccactagtcagttgattaagcaagttccaccttccttcttatcatttttgtaatagtacagattttttatttcattttttacttttgtcaacttttattttagaatcgggggtatatgtgcaggtttgttataaaggtatatttcatacctttgtatgtctaagggtgtaaatgattccatcacccaggtagtgagcacagtatccaataggtagtttttcagctcttccccgctcctctagtagtccccagtgtctatgaagtcccaattttttggagcctcaggttttcacttataaaaaccagaataaatcctgccctgcctctgtcatagaactgtggagagaacctagacatttgattattttatattatagatttgatttgttttttaaactgccaagcgctatccagctagattgcaaattccttgaggaacaggaatgcaatgcatctttatattctccaagaatcgaacaaggcacgttatacatagaaatcttttggttttacttgattggatgaatcacccaatagtctatagatatgcattaagatgaattatagtgacctttgctcttggttttgtgtacaggagttatagaacattctcaccgattaaactgattcctgagtctttctttagcaaaaaagccataatcctgcattgtggcttattggttattcactaagaatttactgactgcttgccaagtggaggcataaaagtattaaaaaagtttcttttgggtacgtataaacctaagtgagtcacttagacatgagatgtaaatttccatttttgaaggcagtatgatttaaaagaaagagcactgggttttgagctaaaagctttggatccaaatttgtacttgcaagttagataatctaagacaagtcacttgcaactttcgtgggccttgcttttcacatctatttttgagaaaatgaccccacaaaaagatttaaacaagatatattatagattatgtaatatatatttatatatgattatgtgtattatggttatatatatgacataggatattatgcttaagcactttatttattgtaaagttcatacacataataaattgctaccacttattcaaaagaactatgaagtccctactatgtgtaaggcattgtgtcaggtgatgctacacggaagcacctgaatagagtgtcccaaggagctcttactctagcagggagaaaagaatatgtacctacatacttcatgtcagtatgtgccaaggaccacaaatggcacaagagcgctaggcactgagtaagcaccaaggagggagcagcatctaagccaatctgggaggaaggctggtattagttttggtgtggggaagcatctgtcatggaggacactaatagaggaggaggaagtgcttacgtgtttgtacaccagctatagctccagcaggcagggtcctaaagagggcacactgctaaatgggaccacactgcaaagggatttattgctggtggacacagggagtctatagtgttttatcttatattcagtgggtaagtagtaaaaatgtgtaaaaccatggcatgttattattgacattttagcatacataatggatgggaggtggtgtaaggaggctatgatactattctgaacatatgatagagaaggtctaaattagaatattgaaacaaaaagcaaggggaaaagcaattcaagagacaaatgtgatatattaatatttgttctcacagttcaattttaatggcccatctttggagagctccgctacatttccaggttgcacactgtgtgatcttgggcctgttatttaatcttccctccgctagcatctaaccttcgtttcttcatctgtaaaatggggacaacactttcttgtagggtggctacaagaactaaaaataatgtgtaaacctcccagtttgggtaaacaatgtgtaaacctcccagtttgggtaatgggttcagcactggtgccactaaatgaagatgaggctgtgataatactataagttcagatccactgaattttccccagttagtatgtggatagccttctatcttccctaacactctattaagatcaacaaacacaacttataatataatccttaaaatatctgttgttttaattaaatcaaatgttatgtggtctgttcttaattttgaaagtctaggtccttagaaattatctgttattattcattgaatgtattacatgtttcattttgtaaatgacccaacttgctaaaatggttttaagttgctttttccctatacctggacagatttttctgtaggcctctctgactattgagatttcccgaaactgtccttaggtgctttttataggataataaccggatactataagcatgaaatataccattttacttaatcaacatatatattctgaagctactaccaaaacgggaaaaacattacaaatgaactttcttacatagttaactctggttgctttctcaacttaacaaataagaactagaatttgtgacattatttccttatgttatccattaatgctgaactgtgtgcattccaatacagagagggggagaggagcaaacaaggactctgaaaagaacacttagcttcatttggtcaaaaaatggtctttacaagggtttttattatgggtcataaaacatgcttaccacaatgtacctccttgaaaaagaaaagaaacccttgtagtggtgagaaactgaaaacaacacactgaaagtccttgtgcctccttcccataaacacatctgtgcatattatctgttttgggtagagttgcacgcacagctgcttatggggactccatagaggtgggacttcaacattttttattttgtgttgttgcaaggactgactttttaaactgaagtcagttatgatagaggtagccaatgtatctccagtggaaggaggaccatgtactcctcactaacaacttcttcaatctgctggaggaagaggatctgggtggtcacaactagtcaggaaaagcatggaggtgcagaggaagggggatcttcaggccaaatggaactgaagagctacccaccaaggcaaaactgagaactgggttaacgatctaatgactcttacaaagaagaatttatccagctaatgttaaaattggtatcacaggccagcacagtggctcacgtctgtaatcccagcactttgggaggccatggcaggcagatcatctgagatcaggagtttgagactagcctgaccaacatggtaaaatcctgtctctactaaaaacacaaaattagctgggcatggtggtgcatgcctgtaatcccagctactagggaggctgaggcaggagactcgcttgaaccctggaggtggaggttgcagtgagccaagaccggccactgcactccagcctgggcaacaagggcaaaactccatctccgaaaaaaaaaaaaaaaattggtattacaataggaattgcccagggaaacatgggcatccctatagatgggaaactcttagtgttcagcataatagagtacaggtatccaagtttttgcattgcaaatacaatttatgtattcagtgctactctgatttagggatacccctgtctaaaatgtcttgaactagttgttttcttaaacgtgcgcctcttgccttcaaacttttcctggcccacctaaaacccccagtcagcttttggtattattctttttccaggcaccaaaaattggcttccactttttcttatactggtcctctaaggcctaatctcagaacaatttgcacatctctacaattaggactgctgagagaaaatgttcataacaagtctgaagtggttgcacatcatggtctctaacttcatctgggctttcggtactgccttctctgggtctctagtaagctccctttgctattgtctataatggctaccaaaaacattcaccatttgtttgtgtttccataattacctttgcaattatacttctcaagactgtcttaaattttaaattctgcctccacccctcatctcccattcatttgtggcttcaacatttagtcacattctgaggcatccccagtcataaggcagctggggctgctctcccaagctccagatgtgcaaacttctgcatgtgcaaatgtacacatgcttcctgctatgttttttagaatagtccctggtaactgtaatctccatctgttccaaaataataatacagtttctttactcccaccaaaacctgtccttccatctgtatttcttatctggtataatggtaccaccatccacccaaatgatcaattcagaaatctgacagacattttagattctttctctcctcccaaacacatatctaacaagtcacgaaatcatggtaattatagttcctacattacctttcaaataagcccttctctcccatctccatggcccttgccaagtagtcagtatctcttgcctggattactacaatggtgttccgacacaaagaactcctgtctttagatttttgcatctttaatcttttctccactgcactaagtggtatttatttatttatttttttgagacaggatctcactctgttgcccaggctggatggagtgcagtggtgaagctcactgcagcttcaaactcctgggcacaagcaatgctccttcctcagcctcctgagtagctgggactataggcacatgccactatgctcagctaatgttttatttttatttttgtagagacagagtcttgctatgttgcccaggctggtctaaacacctgggctcaagtaactcttctgtcttggcctcccacagcactgggattacaggtgtgagccaccatgcctagccctaagtgatattcctaaaaggtaaatctgagtcatgcagaagtcccccactgttcactataagacaaaggtaaaacttagattgttacctaaagcactttaacgtctgcttcctaactatctctggattaatttccagctgttcctacatccctgttactatgctctgagggtaacatgctctattatatctctgttctgttgcaatgctatttgcttttcctggaatgcttgctccattgtcctatcccccgatatacacacatcttccaacatacacatcttgtctgtctggctcctttcaacttgtctttcaaggcttactttaagtaacttttggccacatcctgggcaattctccttacaggcacaggttatgtgcccgcctcgtataatctcacaatgctctgagcatagttctggcacagaacttattccactttactctaactgtaatgtcaccctccctagattacagcctcctgatgctaagaaagtaactggaaatgggggtgggatgagaaaaataaagaagcatcctaggcattttacatacattatttttttcccaggtactctgcatacattatttcatttatttttctcagcaaccccttgaataaattcatattcatttactcattctacatttgtatcatgagccaacttgtgtggcaggctggagaacaaggatgccttgtctcatggagcgaacagtgaaggcgggaaaccgaatttgagaagccagaaaggtgcctaacacacacaaggcccatatcatcagaaacctaagctcctcctcacctcgtgcccaggtacacgtggcccctctgcaactcctcaagtctccagcctcaggcactaagtatgaaaggaatgacccaatgctgctttaaaaatatgctacaaccttgtaattcaacttctaggaattcaggctacaaaaccaacaagtttacaatgagtcaatacaaagacattcagtgctgttttgcttgaaagagtaaaaaaatgaagacagctaaaatatccacaattagaggaatagttaaataaacgatgatgtgtctctctgtataatatcaagcagcaattagaaagaacatgggtaattctgacatgtaaactagataaatcgacagagaaaggagtaaggcttagagtgatatatacagcttgattctattctgacaaaacaagagatatatgtacaggtttatgtatgtgtggctatgtttgcattaggatggccagataaaacgtaggacactaaggtaaatttgcatttctgataaacaacaaatacttttttagtttaagtgtgtcccatgcaatatgtgggacatatttaaataaaaaatcatttgttgtttcttcgaaattcaagtttaactgaatgtccttattttatttgctaaatctggcaattttagtctgaatatatataaaaatgtttggaaagagatatagctacagttaaagattgctacctctgtcaggtgttgaaaatggtaggattatgggtgatttttactttttggattctcctgaatttaccagttaaaattatacatatatattaatgtttcttttaatcaaccctactttttaagttagtagccagcagtctttagaaaataaaaaaatgtagtaagtctctggtaaaatttgtgaaataaatcctctaaggaccattaaaaaaatattccacagaaacagacggcatagtacttcagagttttctaagtaatggcacataactttctaaattataaacagcactgttttatgtcctcaacagactatagctactcgaagatagtaagtacaagttattcagggttttttgttttgttttgtttttcttaactgccacttcctgacagattctagggaagaataggtgctcaataagttttatgcttttaatatttaaagcataaaattattggaaaagtaaaagctagaagtggtgctgacagacaataaaatgaaccattttagagacaaacaatgatacaaataagtactgggttgtttttaagatttactcagtttgtttaaaatattttagaatgaaaactaaatcaataatgtcctctcagaacaacttgaactttgcttaggttgagagtgaaaagcttaatcaaaagtttaaaggcaaaataaccaaggtaaataccctaagtaagaagtttcttttgaaatagaaattgtactttctttccttgaatatttccaatctctgcttctgttcttctgttatgtttgtcagaatcagcacacagcacctttcaaaaatgttttctgaaggtttttatctgctaaggctgtaagcaggcaactttttagcacagattttggggtcatctcagagtgtcagacatgacacttgctggtttgccaagaggtatcaggctcaccagtgctatctggtgtttctttaacacttatatttgaatgtagtttgtttttattttgtactttaactatatatctaagaggaatacagtttttacactcatcccaaaatatacatacacacacaaccttagactcttcattcacaaagtagtacaatggtaggctaaacaaattgtttttcttctttaaagtttgtaaactcttttttttctgaatttaccagttaaaattttatatgtataaaatgtatacatatatatatacacacacacacacacaccccttttgtacttttttggaagataaaatgcatgctggaaattgaaagtgtttaatatttaaaagcctagctatgaggcttcattatctgtaacatatttagagttcgcagttaaaaatattttactggagacttaaaatgtacaagtatgggatgtttgtgttccatattatgaattgctaaaataggctaaaaggcagtagggaaacattttgtctctctatatttttttaagtgctcagatagaagagaggtccaagtgataagaccattagtttgctgccctttctcggtgaagagagaggggaaggatcccattcaaatccctacatcctgggagatttttgcactgcatgtatctgccaaaggacttatactcacaatatataaagaactcctgctactttgagttcgagaccagcctggccaacatggtgaaaccccatatctactaaaaatacaaaaattagctgggcgtggtggcaggtgcctgtaatctcagctactcaagaggctgaggcaggagaatcgcttgaaccagggaggcagaggttgccatgagccaagatcatggcattgcactccagcctgggtgacaaaagcgaaattctgtctcaaagaaaaaaataaataaataaaataaaaataaataaaaataataataaaaaaagaactccagcaactcaattagaaaaagacacacaagagcgaaattctgtctcaaaaaagaaagaactccatcaactaaattagaaaaagacacacaatccaatatttaaaaatgggttaaagatgtgaacaggcacttcacaaaaggggaaacccaaagtccagtagcttgtaaaaaggttaacctcattaatcatcagtgaattgaaaattaaaagcacaataagatatcattacaatggtttaaactgactatatcaagagttgacaaagatggagagcagtcacatacactgatggtgaaacacaaatggtctatccacttgggaaacattttggcagagagaggaacaaaaattcatctcacagacaagatgctcagtaaaagaagctatacacaaaaagcacatactttttatatgaaataagtcagtgtagtgattacatctgggggagggagttatagactggggaaggcataaggaagactggaatgttctgtatcttgatctggatggttacactagtaaaacatcatcaaactgtatgcttgagattagtgcacccactttattctacatctcttattctgcaactaaaaaaaaaatttattgtctttccaatatttgtccaaatctgggaagttattcagtacaggtatgctattcaggacctccctggcaggctaatcattagatgtttcatggactggcacagagactgtattagtctgttctcacactgctaataaagacgtatcagagactgggtaacttacaaagagtaagaggtttaatggactcacagctccacatggctggggaggcctcacaatcatggcggaaggcaaaggaggagaaaagtcacatgttacatggcagcagggaagagataatgaaagccaagcaaaatgggcttccccttataaaatcatcagatctcgtgagacttactcattaccactagaacagtatgagggaaactgcccccatgattcacttaactcccaacgggtctttctcacaacacatgggaattataggagctacaattcaaggtgagatttgggtggggacacagccaaaccataacagagacctcagttttcctttgggatctgttgctgcttcttagtagtactttacctaatttccatttacatcagtttactcattggtaaatgggaggatactatgtttgtctcatacactattaatcaggtaatatgcatgtgtgtaactgctttgaaaagtaaaactattatatgaatgtacacattattattttacagcatttggaagaatccaaatttctccaagtaatgttaaatatgtaacatttttatcactgccaactccctggacagttctcaatttcttgaaacacgaagagtggaaagtttgtaagtaagacaaaaagtgtatagtcatcttcctttcactctatagtacactgcaagagactcaaggtataggctttatggtcctaactcttacctttctcgctgggcgaccttgggtaattttgtgtattttatttttaattgacaaataataactatatatatattcatgaggtgcaatgtgatgttttgataaatgtataaattgtggaatgattaaatcaagctaattaacatgtccattttatcgaatctaaatcttaatgtactactaaaaaagacaaatgactgtcaaactgacatgacacaatttcttatcattcagaagttttaattatgcccattaaaagggctcttgcagacttcttcacatttggattttatctatcattcttgaacatacattaaaaattaaatttgaaatgaaataatttgatgaaggtattccaagaatttcttcacattcagagtcctgctctttcacatccttttctactcagagttgttagatgtctgtgttttccacacaattttgtcttctgtcccatgaagggcactgatgacagagcagtagaactctactatgacctcgaggattttcatgcctgccattgagtaactctgcaagtttcaggcacgtgggcaggcaatcaccactggatcaggactgatgcctgcgaacagtgacttcaaaatgtgttctgttttcaaaggcccatttgtgaaaaaatgggcatcttagaactgatcaaatgtggtacttcgctctttgaacctctttaataaaataatatttatcttcacaggatatgataaagattaaattagataaggttgagggtagagtatttgagtttgaaaataactttccatgaaaaaattttaaatgtagccgctatttccaggaacctgtgttgctgataagtctgctgctttttcactttgggccccaaatctgcttcatactatatttatcaatccagccatccaataaacactgaatatacagcaaaagaatgaaaatttaactaagcactatttttatttgctaaatctggcaaacttatcacctaccctaatcttagtctcttccaaagaggtagtccctattatcagtttgttgtatattcttccaggtttggttctgtgaattatatgagatatacatgtacttcagataaatggaaccaaccagaccgtacctacagtccaaaaaatggctttcccccaactcaacactgtgccttaaagataatttcttataggtctatgtcattctttttaattgtcacatagtattctatacatagcagtctattcagccatccctctactaatgaacttagattatttccattttttccattataattaatgctacagcaaattttcttattcatgcctccttttgcccttgtaccaggatttctctgagaagtgagaagtctcagtcgctgaacatatgtatttttaatattaaaagatacttccagattacctccaaaatgctttaaaggcaaagcatccctaatctgaaaatccaaaatccaaaatgctccaaaatctaaaacctcttgaatgccaacatgatgtcacaagtggaaaattccacgtttaagtacttaacacaaactttgtttcatgcacagaagtataaatattgtataaaattaccttcaggctatgtgtataaagcataaatgaaaaataattttgtgtttagacttgggacctatcccaaagatgtctcattatatatacacaaatattccaaaatctgaaaaaatacaaaatccaaaacacagttctggtcctaagcatttcagataagagatactcaatctgttccaatttataatcccaacagttggtgtacgagactatccatttcttaacagtctcaccaacacctgacattataaaactttttattttttttgcttgcctcaatatgatgggggaaatatttactatcattttacttttcatttctcttattgtagtgagatttgggcattttttcatacttcttaaccagttatttttctatatgctcacaacttattattttaataacctaaaatcagtatcaattttgctggattgtattttgtagaatctatctttttcctatctttaaaaaaacacagaatatttctcacttctagtattgtggcacctctcctagattccatgactcctcaaaggttacatggggctcagaagttgcagccacaagttattgcagtgccctgagatataccttcctattccaggccaaattcaacaagactaaactatataatcaccttccccaaactgataattaacttacctatttctgcttttcctttactccggacaatgagtaaccaagtcctgtcaagtcttctcaatttctcatttccttccaattaatcatcattgccccactccaggtacaggccctgattatttcattcccaaaccagaggaccattctctttgactgatctcctgttgtaatttctcctaaacgagcacactgctaccagattaatcagctgaaaacacaacaatggtatcagccacccacccaagagctgcctaatttgagtttgaaacacagtgcctccacaatcaagtccacttctctcctgcttaactggcttcttgcactcatctctccagatgtacccagcctaatggtgtctttccccaagtggaaaccagcaaatcttgagcaagacttcaaatctctggcttctgctggcttgtgtcactcatgcctcagagtaacagcttcaatattctaaaaaaattgccactttctttaggaagccagtccttatttttccctcttctgaattcctgtggcttttgtcatttgtaacacactgtattcgtcataaactgccttatgtggtggctatttctctatgtatctcattctccctttctagattttaaattatctacaagctgtgtgtccacattaacatgctgctgcacaaggacttacagaataaataagatataaaactaggttgtatttctttgctaggtaggctttcttgttcccatataaagcaggccaataaaaggtgatgtattttaaatacatcaaatattagaacattctaaaaattaccatttcaatttcatcagctaccatcaggaaagaattgagggaaaatgcgcagatggtaatatactatattattcccagggcttttactttttaagtgtttcaatacacaatggaaaattcttaaaattaaatctctaaacttattgtgtgttctaatggcatactgcatgttctatactcagaacttttacagataacaggttacagaatatggctttccagagaatctgaagattttcaatagtatttcaagaagcaactattatatcatcagcaagaaggagcaggaaatgcaaaaaaggcattttatagtcaacaaacgctcaaaccagaaggaagaaaggcctttagggacaccaagtagatcaagtcattttggcgggccattaaaggctccatgcaaaatctagctgacatcactttaggcaattttgatatgccagtattattactggtcagacccttggtatagttctatgatcagttgaaaagcacatggacgtaactagaaaatacacaagagaagaatctccatcctttatatcatagaatgctgaactgtctacaaaatactttctacattttaactcatttgacttgcatattttaatccttgttttatggataagaaaactagggctcagaaaagtcaagtgacttgctcaagtcacatggctagtaaccaggtgtcttgttgctagggactctctttcataacatagaataaataaaatgaaataagcagatggtgtcttttggccttaagacctctcagtactacagtacttccttaaatctagttgaggcactgcttcctgaggccccatggaaggcaaatatatgactactcatatcccactcccattccccatccacacctatagaattaatgaatgtgattttgcaacttaagatcaagtgagccaggggtggtggcacatgcctgaaatcccaacacggctgggcgcgatggctcacacctgtaatcccagcatgtgggaggccgaggtgggcatatcacaaggtcaggagtttgagactagcctgaccaacatggtgaaacaccatctctactaaaaatacaaaacttagccaggcgtggtggcgcatgcctgtaatcccagctactcggggggctgaggcaggagaattgcttgaacctgggaggcggaggttgtggtgagctgagatcacaccactgcactacagcctgggtaacagagggagactctgcctaaaaaaaaaaaaaaaaaaagaaatcccagcactttgggaggctgagccaggagaattgcctaggcccaggagtttgaaattagcctgggcaacatagcgagaccctgtctctacaaaaaaaattaaaaagttagcttggtgtggtagtgtgcacctgtagtttcagctacttgggaggattgcttcagcccaggagttcaaggctgcagtgagctatgatctcaccattgcattctagcctgagtaatggaaatgtctctgtctgacaaaaacaaaaacaaaccaaaaaccaaaaccaaacaaacaaaagatcaactgagaaaaaacagatgccaatgtccaaaaccaaacctgaaattcttcagggtattcatatcaaattctcattcctataatcacatgtacatttttgatcctctgaacctcttttccacttatatctcatagggaacttctgactgctctgcagcacttggtgggtgtgtcctgtaagtttttgaaggcattctgctgtactgatttgtagccttctttagtcctgtgagggtatgcaataaatgtttaccaaattgaataaaagccacatgtttattcaacatacacccttatttgacaaatacgcaagtgattaccagggaaataggataataactttgatagtgcatagtgagcactactgaaatgaaatgcagagacataaatgattacaattcttcatggagaaaaaatatatactgtacttggaatgaggctctagttgaggagaataaaatgttaagaatgaaagttctagtgaagagagcattactgattctggggtaggtcagtcaaatgagggcaaagttcaaactaacattgtttttagagcaatgtacaagcaagtatagtaacacattcaaaccagtaataagatgttttaaatataggtctttattctaggaaataattctacatgagtgagaaaaacacatttatatggcttttggaaagtccaccgaactagaataataggaacttggttacagtcctagcacagtactaactgcatgactttgggcaactcaccaccctcttcgggacccacttccttaaacataaagtggggagaggctgggctacatatattccaaggaattttccaactctaaaaatgttataatttcactgatttgtgtataagtgataccttcaggactctaaaatggcctcctgagtaggttaaaaatgattcctccagttttggttacaatcctaatttgtggattccactttgatcaaccttgccagcttctcaagatttcaatttgggttgccactacgccatattttgaaaattacaagaaagagtaaaacgggaatgggctgactttacatgatctatgagtcacagtgataaaaccttattgtaacaagccatttctaaacaaaagtaacacaaataaatgaatttacgtcacaatgtggaaggcaaacctttttcagcatcctagtcaccttttgagacctgatggaatgacctgacagaacaactggaatgctggttttgaaaatgtcttgttatagtcacagtgtgatctgaattggtttttgcaagcctttctttggcttaattcagttttcgcaatataaaaatttacctggcataaaggaagtttttaaaaaaaggatttaatgatacttaatgacagagttttcaacagctaataagccattcattcctaggttttgaggcagaacatggattaccagctaaactactacacgatttatttcctgtacagacgtcatatttgatcattacaagaattgataataaaagttatgacttgggaggtcttcgtatttttttacaaaggaaatagacacagattctaatatatacaaaacactaactagacaaattcctggagtgctttctgaattgccaagaggaacaacgtcatataaaaattccttcgaaatgctaaaattccatttctagtggtctctcataatcttcctttgttctcaaataaaggtgtaaaatattttgtcacacaagaaaaactgctaagaagtcttaaggtgatgatgaatctcctactttggatactagattattgctgatattttaagaagaaaagaagtgttcgagatacattttgtcttgaactaagttgggctctaattcacaattgtgttaaagttcatgtatcatgtgtaaaagttgtacatcataccctcagattttttttaagcaggattttttcattggagagaagataatttaactggagactatcctaattcaatgataacaatacagcaaaagtaaccataaacaggtaacaattaacagagatctgtgaggaaacagcataaaaactgttatcacatacgcagttttattaactttttgcaaataaattaggctgtatctttgtaaagcacacagtatgtattcctcaatggttgtaaagtaaatatgcagtgataagagtatattctccttaactctgaaaataattttagggatgttaagcaaacaacaatatattttatgaatggccaaaatctaatgaaaaacttttatttctgaatcctatcatttataccatgtggtttaataataatacaattaaatatatgtcttcatttcatttctgaatttattttatacacttaagaggattataataattaaaattataaaaataaattaccttaatggcccagagggcacggaaatgctaaaacatttatgttaagtaggagttaactcattaaagagcactgacaaagatataaaaattatatttaattctactatggtgacttagatgaaatgaaaacagtctaatgggttgtgcaagagtcacaaatctagctcctggctctatacttgtgtgaacttgggcaaatcattaagtagctatttatgccagctgcctccatctgtaaaataaggacagtgctgcttcccaactgcatgagaatgtcctaggctcagctttgagaagtttccctcagagtttaatctttaaaaaaaagccaaacccaatcaagatataaaggtataggaaatgttaaatttccttaaacttgcagactagacaatgtcttccaatggcattgcagaggttgaactattccactgttcatgaaaatagtcatgttattgattcactactaggcttgtgtctacatgagacagaactctgagagtaaacaggggataagttctggtgaaaagaatgcagtgagtcattaggaccacaagtgaaatgaaatgctataccaaatgctgttgaaactttgggacctaaaatgagaaactactttttcccatgagaactcagtaattatcattttaatgcatgttaggaaagattttcaagttcttagatgacatgtttaaacgtaagtgttttcaatgaaatacgccattttataaaatacagtcactattaattaatgccaaaactaagagaatttttatggaattacatacagacatatgactaccaaagcagttcatcatgattgatgttattattctgaataccacaggagttagtaatgattcggtgccttcccatgaagttcaagccaatgttttttttgtctaattggctcatcattgttcactaaattggtattttctctgctattcctatttccaatcctctggtattcctctagagtctacacaatcttcaggtaactgcttcaactgaagcctgacattatacgacagatcctgaaattaggccaaagaaacaattctgaaataataatgctttttaaacatgaagcaagcctaatttatttactttctctatattttcatatttaaccaaagaaacaacctactttatggtgattaaatctacttctgaacatcaaattgtgaccttattaagttattaaattatatgcttcacctgtgaatactgaagcatatgatttaataacttaataaatgtcacaacctgatgttcagaagtggatttaatctcaaatagaattcaattactgatgatcccctaaaatcagagatcagcaacaagagtagatgaaaaatcatttacagtctacccatctgtaagaccagagatcccataattagtgattgagcccatactcatgagggctcgcatttatgtgtaccttactgattttcctttgtgatctaacatttgaaaaattataaataccgaatgaggcaaatttctcagaatctacacattattttgagaaatacttttatttctcaatttttagatatacttaaaattgcataagaagattatcttatttatttatttatttttgagacggagtcttgctctgtcgcccaggctggagtgcagtggtgcaacctcggctcactgcaacctctgcctcctgggttcaagcgattctcctgcctcagcctcccgagtagctgggattacaggtgcacaccaccacgcccagctagtaagaagactaccttttgaaattggcatctcttgctctaagagggccaactaaaactggtgcctcaagtttcctgcctgacatcatggcagaagtattgaagaaagccgtttctacctcagatttgtggttcattcctactccctgctttcaatgaggtaggaggacccctttgttgctgctagtattggtcataactcctgtgctgagtcagctcatggaatgatataaacagttcacctgggaatggaaaccttgtgttccacctctgcttcattgtgagatcatagacaagtccctaacctctgatttctgttttctaacatatacaatgagggtctcagactagataatgtcataggatgggaacagccctaacattcatcactgacaatctctccaggctctgcttggtgatcctgtcacttcttccacacaggaagagatgaagtctcaataaacacagtaacactgttacttccactcaattatcctaatggttgcttctatccctcacttaaatattttaaatggtgccagcatcttcctcagtaacattcaggaagcatctcagtaaaatcagaagatgattattccctgcactgcattgtctttggtgcaatcatttagatgaacatcagctcattttcctgtactcattagtattgatcattttcagaactcctgtcatttttatgcccccaaagcaaaatggtctcttttcagaggagaaagttccaggtctacataaatgaacgcaaaacctgttgaagttaaaacatggtaagaaaccattcttttcccccattctttctgtaaacagttttaatgattagttcaattgagtaagttggaacaaacataatttcacacaggaccatctcagtcacccatccctctgtgctggtaatcagaatttcactagacaaagccactccaaagcacagtatgtgcttataaaggttagtcaggactctatttggataacagcagcttaattcaatctttaaaaaataaaacaacagtttttggaagcctgtattttagagtttcttttctcatcttggattgcctttctcctctataactggttctcatttcccaaagtctcttcttgtttgtgctccctaaaagtcaccatagcttgtggtaaagaagggttgacagtcagcaagatggatctttctggaaatggaagccgtctggagcccaccaattttaactacttcagtttgagctgaggaggagtttattgccgctctagtccccttccctgtggcagtaaattaccaacaattaacagagtccatttcctttcaccctcttggccctaccactcttctctgctctcagcaaaaacataaaaacgatcccccaaaggacaaaacctgccaccaaggcagcagcactgtggtaatttcccaaggcattatgattgataatgatcagcagagcgtgggataatagctccccttaatttactggtccctttgaagggttaaaatatggcagatgttgatagccgacactccttgctaacaggaaagacacattgctgtggggcccacttctaggctttcctttccccgcagctgtctgtgtagggctaattgtatccacttgtttaacctcggggaacgtctggaggggacccagtgccacaagggtaccttttttttttaacggtcatttcctctctggtgtaacttgcatgacagtatgtgacaagcagaaattaatggggacactgctgtgccaattcctcctgaattgctgacactggctacaggctgcctgtttgccacccagccaagacctcacatgaaacatggcgaggggcccacagctctattcaccaacaagccagctggtcagtgatgagaggagctgaaacaatgtggtgcgcacaaaccaggaagaaaatgctttacaaaccgcttcaaaccaaggaggtggcatttgctgggagttaatatgctagtttattttcctgagtggcaaattgctgcaggactccaatctccaaagtgcattagatataaaaagtattcctcttccaaagcctcctaaggtataagttggggtgcggataccattcaggcaaaagggaaccacatgagatttatctccaaggagtcttttccaacagtcagcttccaggaaggtctgggagccaacagggtatctcttgcctctagctaactaccacagagctgcccggtttaaaaattctatgcatgggtatctctttcactctttcttgcacatacaagtgcacatacaaacacacacacaaaagaacctcatgttcaagcccattaattgcccacaacgttttgcaaggttggagaatctgccccaaccttggcaaagtccactttctccctttaatataataagggatcaaactcagctggcggtcacttaaaaaggtggctctgttatagattaggccctgctgatttaggcacagatgagtgaatagaggcatgtaaaattgtaaaaaaaaaaagaaaaaaagacccagcaaaaaactcacctaactatgatcttgtgtacaactcaaaagtcaagtttaaggagaaaagggggaaaggtgtaatgggaaaattacattggtaagatttttacaacaaatttgggaagccctaaggccatttcaaaaaggcacaacaaacaggctcctcaattttgtggctgggcatggcatgtagtgaaattttgctgctctgaagtagtggagaagctcataaaaacaagaatctatttaattcactttttcttctattcaaagttttaaccagttgatgtgaatcggctttacccagtttctgggaaaataaggaaccctcacagaagccagggaattcagtcaatgaacaatgtaggtttagatctaggttagacagggctctcatttgttggagaataaaagagaagagactgcaataacttaaagagttgtatcaggttcactgttggtattaatagaaggaagatgtatgcttctacttccaggggaactcttccaatgcaacattagagtggtgggctcaggattgtcattctttggccatcctgttaaagggacaggcaatctatctttccaataacaaatgggattaacaaaattctccatttcaattgggcaagaagcgcaagaccagagggggaagaaacggagtatgcatacccacctccactggataagggatctgggaataactttggtggggcttttcttttctaaatataatttgtgagagagctactgaatttaggaaaggtttaaaatgtttctaacccagaactgaaacacaggcctggaaaaaaacacaaaggaagaagtcatggaattggaaatgctaatctcttaaacaaatacatttccaaaatatactatataatgcaacccgagccttttaaaaaagttcactgccaatatagtctttaaggatctgtgctttctgataacaaagtactgtaatattgatttttaacttttattttaggtttgggggtacatgtgaagattttttatataggtaaacttgtgtcacaggagtctgttgtacagattatttcatcaccaaggtattaagcccagtactgaacagttatcttttctgctcctctcccttctcctaccttccaccctcaagtagactccagtgtctgttgttcccttctttgtgttcataagttctcatcatttagctcccacttacaagtgaggacatgcagtatttggttttctgttccttcatcagtttgctaaggataatggcctccagttctatccatgttcctgcaaaatacatgatcttgttcatttttatggctgcatagtattccatggtgtatatgtaccacattttctttatccagtctgtcactgatgggcatttacgttgattccatgtctttgttattatgaatagtgctgcaatgaacattcacatgcatgtgtctttatggtagaatgattcattattcctctgggtatacacccagtaaagggattgctgggtcgaatggtagttctgcttttagctctttgaggaaccgccacactgatttccacaatggttgaactaatttacactcccaccaacagtgtatagtgttcccttttctctacaaccttgccagcatctgctattttgtgactttttaataatagccattctgactggtgtgagatggtaactcattgtgggtttggtctgcatttctctaatgatcagtgatattaagctttttttaaatatgcttgttgaccacatgtatatcatcttttgagaagtgtctgttcatatcctttgcccactttttaatttttttatcttgtaaatttgtttaatttccttacagatgctggatattatacctttgtcagatgcacagtttgcaaatattttctcccaatctgtagggtgttgtctgtttactctgtgatagtttcttttgctgtgcagagctcataaacttaattagagctcacttgtcaatttttgcttttggtgtctttgacatgaaatctttgcccattcctatgtcaaggatggtattgcctaggctgtcttccagggtttttatagttttgggttttacatgtaagtctttaatccctcttgagttgatttttgtatatgatgtaaagaaggggtatagtttcaatcttctgcatatggctagccagttattccagcaccctttactgaatagagaatcttttccccattgcttgtttttgtcaggtttgtggaagggcagatggtcatatgtgtgtggcctcatttctgggctctctattctgttccattggtctatgtgtctgtttttgtaccagtaccgtgctgctttggttactgcagccctgtagtatcatttgaagttcggtagcatgatgcctccagctttgttctttttgcttaggattgccttggctattcaggctctgttttgattccatatgaatttgaaaatagtttttctcctagttctgtgaagaatgtctttggtagtttaataggaacagcattgattctgtaaattgtcttgggcagtatgtccattttaatgatatcaattcttcctatccatgagcatgggatgtttttccatttgtttgtgtcatctctgatttctttgagcagtgttttgtaattttcattgcagagatttttcacctccctggttagctgtattcctaggtattttgttctttttgtggcaattgtgaatgggatctggccttcctgatttggctcttggcttgtctgttggtggtgtataggaatgctaacgattttggtacactgattttataccccaaaactttgctgaagctgtggttaaaaagctgcatggcttgtcaaaggctagccaactatccatgttctatttgtgagttagggaactacaaattgtattttaaaaggcaatccagcaagcagctgaatataacacacacccaggcttcttagcccttcttcatgcttccttaggtctcttatcagaacaagaagaatagagatctctgttatggctttcctgtggcaagtaaaagacaaggcgatgattttccagtccatttcccctggcaacatgctcatcaatcaccaaaggctaggactttgttattttggctggaggcaaaaaagcttagtggtttctgtcttagtgaaataggactctcctttaacctgtgtttcagattagcatcagggcttgctgcctccaccttaagtgtatctgctttgatggcatataggctcacaggacgagtctggaacacaccaattttagctactatagaaatgatttggtctgggataaaagttattttttttaaaaaatgtgtgtggtggggccagttttctaaatccaacaggggcattaccaaaactatgggtatttatctttctgcaagtgatgtgtcctcagcagttttcatttactgttatccatactggtctattttcaccttcatactttcaaaaggccacagtaggatggaacaacagactttaaggcaaaaaaaaaaaaaaaaaaagaaaaaagaaagcttaaaaaaaaaccatacacacaaattccctttgtttggcatcactttccccttttatcccatttaatttgaaagaaatgtatattgtccttgagtggacagtggagttatatacaaacatgttgctgtatggccatgcacatacaatgaagattgctgttagcacttcaagtctcaaattaaatattttgcttcaagaaaaactgaaaatggaaagacatctaacactgcttcattaaaccaattcagcattcataatatcttatctattcacggacaatctccctgtacctgctaatccaggattttaaaagtattgaaagcctagagattgttacagaaatccctgtatcagtaactgtcattgtagtaaaaataggcttgcaactttactgtattctgtacacagacattaatttaaaaatttactctcatcagcaattgcttccatttacaatcaagtgaaatttctccatagcccaattatactatttaatggtaaaatgtttgtaagactaaaggagataacaatggtgtcaataaatctcattagaaaacttatcatatcatttttcctagtccttcaatgtttgctattttatcaatatcatcatcatcagtaaacatgtactgaatgtttttaatgtatacacactgattattttacaaaacctgtccctttgtgttgcctaagagcaaaggaagtgacactatgttgttaattcttatgttgggctataaagattcagatgtgagaacttcaacttttctgtaatagagggcattccccaataagatgtatgctaaaacagccttttgttggattataaaaatattgggttgaattatatgaaactgtcatttttgtagggcaaaaccagtcaattattgggaatgtcaaagggttttaatgttgtatggcactaacccattgtaaacaataaattataaggaacccataataccctgacagagatatatactgttaataatttcatgctagttttttaatatatgtatttgaaatacattcccaaaatgggatcatattgtatatatgtatttctttaggcaattattcttcaacaatatgagattttttgaaaaatcatcctatgagatgtattcattttgctagataaattttcataatgtatttaatcatcccctatggtacatttttttattgttcatttctctaattatttgggaggttgagcatttcccatgtctaccagcgttctgtatatatgtacatctttgcaaatttgttcatgttcttatccatatctaaactgggtaatctcctttttcttagtggtttgtaagagctttttatatattaaggatattaaacctttgccatagtttttgcaaatattttatcatttgctttttagttttatttataatattttcagtctaaaatttttatagtctaatgcatgaatcatttcctttgcgatattttctactgtttcgcacttagaaaactctactaccagatctgaaaaatatttgtttacatattattatatcatttaaaaaattaataatagctctctcctacacacatatcttttgaaactataaagtatttagactgtgtacaaaatataaaacaggccactcgtttggtatccaaagctgaaagtgttgtcttcagcctcctaaccagcactaaatgttactaaatcaggcctgtttctagcaaaatttacaagcaaactcagctgtcttcttttctaaggaaaatttcctgctgtacaaagggttacctctgaacagtatctccattatttcactcatgactccattcctaattttctgttttctggcagctgctctccaacttacaaataatgtgtgcctttgtttagagttccttaaaaaaactgtatattctaaatgtggaagaaagctcaatttattttactttgaaacctgagaaatcaataacatgaaccatatgttaattatagaacttggtgataaataaagtaagaagtccagtgaaactgtggagaaagtgatggtggagttgaaacaaaaaagaagtcctttctcttcatgtgtgatgctctcataaatctccccacttgggaggataccaaaatgcaactctttttcttaattcactctaatgtaatttgtgttttacttccttccaagttcccaagtgtttttattaggattttgcagcaaagataagatgcatatcatgggctgttagtatagtggcaacattaagaaaagatgatgtcaaagacaaaacttaactgatatttatgtccttctgtggtgtttatttcaatttacatagttttgtactaaagatataagtcaactcatctttagtttctggttgaaatattaaaggacttgaggtttacaagatcaattgctatgatcagagtaataatcataatgggggggacaagaattagcaatgtaatgtttcaggcacttacactcagcataatcacatgctttttaaaaaagcactttctttttggtttatttatggtaaataaatctctccttcttttttgtgactcattcaaccaattctcttcctgtgatcaccaacctatttcttccctattcttgaaccccatcctcccgacccggaatatattttggtagaggaaggaagcagagggaagcagggccctcactcatagcttttataccatcttagtctcaacaaacatttcaagtcttcagctatgagtaatggtgaatttctcagttccagacttaaatattaacatatgatatattagtgaaattaaaattttaacaagtgtttattccatactaaccgtattcatagaacacctttttttttttttttgagatggaatctcgctctgtcacccaggctgtagcgcagtggcacaatctcggctcactgcaacctctgcctcccggattcaagcaattctcctgcctcggcctcccaagcagctgagattacaggcatgtgccaccatgcccagctaattttttttttgtatttttagtagagacgaggtttcaccatactggccaagctggtcttgaactcttgaccttgtgatccacccacctcaatctcccaaagtgctgggattacaggcgtgagccaccgcgcccggcctagaacatcttaaattgaggatagctatttccagattgatctaaatctgattgcttaatagtaaacttatcttttaatgttgcagttcctaaacattattttatgccttgcagtccccaatctttgctacatttggtttaacattctaatctaaaagtggtatgactatactacagtagaatgataaatattttctttggttttggccaagaaataaaaaattaacaagtatggccagtgacaacagtgaacactggtaatataaaaatcagcaaaactgctagcttaaatttgctaaaggcctagaatgacaattagaagaaaattagattctgagtactcatggctttcaatatatgagcctcagagtactaggtttagccacattggtgtcagcactaaaaacctatgactatgatatatttaaatttaatatagttttggttccttaccaataaaacaggagtaggaattctgacccattacacttgcaagtctggtaatggtttactaatttaagaccctagagaactgttaaatcattagtgtatatgaaacaaatagcaactttcaaaggtcaaatcatgaatgagtgatgaacacttttttaaaggaaagatttttgtgtggcttaaaaatttttagttggaattctcctattcctaagcatctctttaatttatatctcctattaatgagtaagtatttttcaatagaacattttaaggaataaaacttcagtgcctttaaacaaatttcctacatatcaatgacgttagtaaagcaccacacctgacttcacctgggcttagattgcctaaacctactgattggctggggttaccaatgcacaggcaagcaaatattccagatgtctgagtcatctcagaatgtaagggagatgttttccatttcccacttgtgtcatatgacatactgcgggggttgggagtatgtcttaagctgcagtgtctggtgtcaccagagggtacttattagaaactccctcctgagactatgtttgacaatgaggaatcagttagggcaggattgtcattttaagtgagcaccccaggtggttgattcactgaccacacttggagaaacaaagcatagtgtttacaaagcctttatcaaccctttattagatagttactcatttttgcaaaatctgttgggtttaaaaaaaaaacctgttgggtttagtccattttccaggcatcctaattaatctaaccattacatggtagtagccaaggtttatttgtctttttttttttttttgaggcaaggtcttgtgctctgtcacccaggctgctgtgcaggggtgtgatcatggttcgctgcaacctgaatctcccaggcccaagcaatcctcccacctcagtctcctgagcagctgggactataggtatgcaccacaacacctggctaatttttgtattttttgtcaagacagggtttctccatgttttgccatattgttgaattcctgggctcaagtgatgcgtcctccttggtctcctagagtgttgggataacaggtgtgcaccactgcgcccagcccactttgtcatttctgacattcaaggaattctcttttactccctaaactccaagtgtcacagtgcccagatgctaagtccttaattaaatatatgaatccatattcaggccaacctctcctcctcacttgatttaccgtaagaatcaatctttcaggacaattttgcttctagagggtgatgatgaggaagaggaagaacagaatgacagtaactacaacattattctacatactgaagacaccagattctcataactggcactatggggtttgcaaggcttcattatacaactttttgtgaaaccacatattcattcaacaattacttactagaaccagtaattacttacttaactgcaatgaaacgattgtttaattttttccaccttgcttaggaatgaggaataagatactatctcagataactgatggatacctactttgtatgcctttcactgatttaaaattttgtaatgacaatattgcaaattgttggcaattgctctagtagaatggtcctttttttcaacttaatatatatgggcatctgaaatttctgggtaagaatgataaaatccaaatgaataaatatagtatagtacttcaaagatttaaaaaaataacttattcctttgaagcttctagttctcgtgatgggaatggggaagacagcatacaattgggatatagggaaagtaattttaaaatgaaaaacatgtatcactacaaaattattttttagatatatactcctgagatacgagaatagggtctaaaattcatgacatccatccgtctcttcactgagcttagttctccatccttggtataaaacatatttaagcgtcccaccccggggaagaacaatttctggaattcagttagtatttttggaattagtactattttaaggagaatatatcttatagttttggtaggatcagttattggttttagactatttctaaaccaagctatattcttagctacaacacagataatcccagaatcccggcccaccacagagaactgaatgcgcaagtgcaaagtgaatgtgccaagatacaacataccttcagcttatttttctgtaatataaatatttaaaaattttatccttgaaaaagtaccatttcctggcttgtacaatggtggtattgatgcatacatttctgagttaattagaagataaacacctagtacagttacaaacacatgtttactgaggatcccctatgttccaggcagtatgctggccctggagctagtgcaatggactagagtcttgacttaaagtctcatctagttgggaaagattaaaaaacaaacataaaaaataaatgagataatttcagctaagtgctatgaagaagaagataaaataggataatgtggtgtaatgtgataaactataactagatgtggagttgtagctgagagggtcagagaaggaatgatgaagacatgacatgagctagagggtgtggagcattccaaacagatgaaaaatcagcacggacaaatgccgagctagaagcaagctggaggaacagaaagaaggccactgtggctggagaaccgtgggcccaaggaagagtggaggcagatcagaaaggcagggggtggggagcactagatcatgtaggacttctgattttattctacaggtcatgagaaaccactggagctaagttttcagtagggaagttagataattttatttctgctttaataaggtccctctggttgttatacagaggatggtccataaaggggcaggagcagaagtggtgtgttgagttaggaagctggttgatgggttaaactagaactatagcaatgaagatattgagaagtagtcagattggggatatcttttggggataacaccaaaagcacttactgatggattggatgaagactgtgaaggaaagcaaaaaatcaagaattatgcctaaacttggggctcaaacaactggcagatagggaaggcttgagtttggcagaggattctcggtcaatgttttacatggttagctgactatctgtaccaagagcatgtgggagacgtcaggctggagaataggtatttgaagattctggactaaatgacatcacttgattagaaagtgtagccaaggaaaagaagaaggctgacagtgaagccttggatgttcccatgtttagaggaagaagagccaaaaaaagagactgcaaccaaggagtttagcacaggctaaatttagatgagaaatagccttccttctacgcagaagagcactctgctatctgttgccatggtgatataaacgggtatatactacctgcaagttttaatggactttgtaaacagattcaatgcctagggtgaggaagcattttctaaagagattctaacttatctgttattagctgaatctaagtgtcatttgcctatttagtgagtcattatttatttagtgagtcagtcttacagtacctttagaaagaaactagcttttcttaaacccatatttcctatccccctaccaccactatcaaccccctgtaccccaccaaaggttcccttggctctgcatagctctgccccagcttccttttagtccctggctttaggctgtctccaacctaagtcccaagattctttcatttttagttctgctgctcttttacattaatgtagctttttataggattggagattttaaaaaacctactaaatagctgttatattttttgttaggatacatacacatgcataattctgtcctctttctcttctgatattttcagctactataagggttaggaatttgcaaaaggatttatttctgagagtcttcagaatctagactgcataaaaatgttctcctttaagaagttgcttgagttactgagttttcccttggaatgaaagatacttgaaagcacaatatgtatgttcctgattggagcagagggaaacaaatggaaattattagtaagattacactgaaatcttactaattagaaaggttacactgaagattttatttctctctacactttagatctgggcttctgactttagtagtataaactcccacagttgttagagctcactcactctacatttccccctgaatttggaatatactcagtattgactcactattcttccatccttcaaatcatctctcctattccactcagtggtcagctgctggcactgctttgatttatccccctgtctactctcaggctggctgcttaatttttgcttagcagtatagtctttaaaaaaaaaccccaaatttcaaaactctcagtatgtgtgggggcagaggggtgcagagtggggaggggcagtaaagttgtggtttctgtggagaaaatatttctttggagtcaaaagactatattaaaagctcgtcttccacagaatataggtcacattcctggtaaaagtttggatgcctgttttttaaaaaaaacagaatgtctctaaacaccatagttaatatactataagtgatatactttgaataaggcataataagggtctacaatgtgcataaatcaactaggtaaaacattataataaccaatactgtaaaaagctacattaatggagaagggcagaagaactaaaaatgaaagaatcttgggactcaggttggagagagcctaaggccagggtaagctggggcagagttctggagagacaagggatgctgaaggtgggaggctgatagcggtggtgggagtttgtagaggggtaaacagtgaaaacaaaggatatagaaaacacagggtcttgagtgccaaaaagaaaataaactgggaaaccacgttcgcaagttaaaagccttgaaagatctactatactgtgaggagtgaactattttaagtcaaattgctgtaggttaaggcccatcttacagtaaaagatggcatcactgatctatgaggtcttttaaaccagaactatgttattccaacattcgactttgcttctttaaagagactttattgaacagtcctctcaggtgtctttcacaaatgtactttctttttaaaattatttcctgttactatgaaaagtagtttgcatcaaataccaggagagatgtgtgtgtgtttttaaaaacatggtctattcaattagtgcagctatgatattagattgaaaaaaatttccttccaagatctttatcattatggtagagtatttgttctttgaatttcttgccttgtttttgggatcaccttattatgcaacatctgctctgaatttcaaatgtgataaacagagtatgagtgtcggtggcagatggctaatgaccagcagcgacagggcattcaagcctgccttgttttctgggaagcgatattttcatgttaatttgctctgtgtcctgcaaagatgagacaaatcacctgctcgtaattcaggcaaaatggagaccaccaggagctgagaggggccatggcttgattcctttaggagtgagaagagaagaagatctgagaggctttcctcatctgcagtacagggaccagtcagtcactttgcattatgtcaaactgagaaagatgaatcagccctgggcatcccatactgacatcagagccactgtttactgcaagcagatattattcatgaaaacagacatttcccagaggcaaaaaacaggtgctattaacagtgtgtgtcagtttctgaagtctgggttttgtaaaataaacctaatagtgtgttttatctcttactaaaaatattacaaccaatagaaaactctaagaaacattcaattgaagataaaatgaaatctaattcacagagaaaacgacccacacagacatgaacctggagcttttctggccctctcaagctctatagaattcatttatcataaagatacataaataaaaaaaattttattccaagattgaatcatcaaaagaggccatatggtcttgagctcaaagaaccctgtcctattttagaggctgctgttcttttgtgtgacctttcagtgcctcaaacttgtgaaactatattgacaattgcatcaaacatttttttttatcaaacatgtttcatgcacagaatgtccacagaataattttaggttttcaaagagtttataaaatagttgagaagccaggtcatatcctaggaaagattaatgtattatacagacaagactaaataccaaatgaatgatttagtaaaagagggcattacatttggaaaagcctgtacaggagaatattttacataagagtctctctccatctgtatcttgcagtgtacagttcttattctgggtggcagttacaaattactaagaaaaatggtgagcaaatttctttacagttctttctgaccctctctcataggatggcagatgaaagcatgaaagagaaaaataaaaatctgagagctgtttttttttctcataaagctccataaatggaaggtgctatataagcatagatactctgaatttatcacgtactctaaaagaaaaaataacacaatcattaaggtgtcaattattgcctcataaatctcagcatggaaacccaggaaggcaatattaaatctcaaatgagccaataaaaatttaataaagatggcactgaactcctccacaagtaaacagacccaaagataatatcctgaattagaaagaggaaagccagatatgtcaacaataagtctatgagggaaaattagaatatctgttgacttcacaggacagcagccaacaggctgctttatgcaaatgtcattgtcaaccaagaatggatgcacctaaaggacatcaagaaaagaggttaaataatgtgatgaaaaccccaagatgaagtatgaatgtgatttctatgtatgctttttttttttttttttttttttagaataaggtatatttaatgatgttggaaagaatcacctatgattttattttattctcatgaacttctcaatgaaaattttcagttcaggcctatactcttaatgtactttattaaagtcccacatgagcaccgtgcaataattagagtttccccaataagtttacccaactatcaacctttattagtacttatggcttatggtgtggtttaatgtcttttttatttttcgaaaacaaatggcacttaagtgcacttcaaaaactgttaggtgatataagtaagctagaaaagtaagatcatcatgggctcttttctaacaaacgtgttgatgaaatgataagcaaaatgatgttacccctatgatatctagtaagacaccatggagcatcctagttttatccaagtactgcccaactaatgcaatttatgtcctgaatgtgcattagaatatcctgagtttcagtggcctgttaactggtaaacagtgccacagaaaacacaacactgggtagaggaaagtgggtagaggaaaatcccctgagcttaaatgatcttagatgaggtcttgttttgattttctattttatatatatttcatgttaaaatatctggccaggcatggtagctcatgcctgtaatcccagcactttgggaggccaagaggtgggcggatctcgaggtcagtagttcgagaccagcctgactaacatggtgaaacccagtctctactaaaaatacaaaattagccatgcgtggtggcccgtgcctgtaatcccagctactcaggaggctgaggcaggagaatcgcttgaacctgggaggtggaggttgcagtgagttgagatcgcgccactgcactccagcctggtgactccgtctcaaaaaaaaaaaataaataaaataaataaataaaaataaagtatcttagatatgtgactccgtctcaaaaaaaaaaaaataaataaaaataaaatatcttagacacgtgactccgtctcaaaaaaaaataaaaatatcttagatatgtataattatttaacaacatgatacgttttaatctatgcaagacaatgtcaatattaatacctatgatttggatcctttgaaaagtaatttaaatttaagtattttaaaaaatagtttggcacaatatagactgtgcttacttatacataagtagtctgttcttgacttgaaaatacccctaaactacttaaataaccatacagaatgtgtaccacaggcttgtgtttgcattttatctcttctcttatactctaaaggtccttcagagcaggtcctctctttctcatgcctaattcaattttgtgtccctgaactgcctagcacagaaccctccctgcacagagtgaatattcaataaatatctgtacgagtatagtcagagaagctcttattccaacagagcattctatataaagaatcaatttctgtgttcccaataggttgttcagaataacaatatttgcttgatctagttattaaggcttcccataaatgagcctatataacaacaaaatatttctgttctctggctgtgtgctttaaaatttcaattaaccagaattcagattctcctacttagcagctgtttattctgcattccaattcttaaaaacaagtcaatcacagaaacaaaagatacgagtgttgattaaaaataattttgtatcagttatatattcagcctaaaactatccatttgatggttttattatgcttttaaatgattattcaagttttcaacaatgaccttaaagcatcacaaacactcaaattattttttaaaaaaccttatatttaataaggaaggaaagtaggttagtatagttcagaattttttttttaaattaagaatgaagataaaagagtcttctaattagcttttaagttagcaaaaaatgtttgattaaccactaacatgtaagttaactgcctgaaatatttcatttgactatggtttattttactatgaaaacatcaatacaacattagccacaaaccttcaataactagagccccttgcccccaactccacctcgtatctgacaatttggatcaaggggtgctgatcctaatggctgaagaaatttaacagcctccaggacaatccctgttcaacacggaatgaagtgacattccctttcctggagatagacaaaaagctcaaaaaaaaaaaaaaattaacttttaatgtcaccttgttcaagagcttctggcaacaatcacccccttctagcaagcctccagctccatcctggctcagccactgccccctgtcttctcctcccctttcttactttggtgaccacccttctgcctgttccttttcctatcctgcttgcccctccaccctcacccttgagattccccccattccaattcatttctactcctgcctgatcaaacctgagtctagtaaaccactctggcttatcaacattttaactgcacagatgcctttgcaaatgattccactcagtagcctccaatatactaggataatttaatataatgctcaaaagatctatgtaggtggtaatgtaagatataaaatatatggttgcctcatctgtctgtttttttaaaaaaaagatactccccaaataactttgaacttagaaatgtatcagaaaatgtcaatgattttttgatagtctatgtttaaagcctttgaaagtcattttaaaaataattttgaaaatacttacatctaaagaaagcttgacaatgtgtcttatttactttgtacctatgtgtataaatcattgtgtaagacactgtcaggacatgaggatgactgaatacatgagatatgtacattaaaaaatcccaattaaaggcagaaaacaagataaagaggtagagatatgcagaacaagtgttataaggcatgtgagattacatctagctataagagttgatcaaatggcttttgagacggcacttgaaaaatttaggtagatagcctggtgagaaggagcaaaagaaatggcatgagaaggaaggccaccaaggtggaaaatcacagatcataccaagagaatgatgagcagtccaatttgcctagaaaactgtataagaaaaaggactatgccctgctctgcatgctgaacacagggtttctgacaaactcataaaggagagaactaaagcttcaggggtggaatagaatgccagaggaaagaggggtgcacagacagaagatggccaagaacaggtaactatcaggcatacctacatttggagggccttaatgtccttgaaactgctcaggaagaaatgggactattgttaagcaccagattctttaatgagagccagatgggaaaaaatacaatattaatctaaaacaaaaggaataaatcattcagtatgtcaaattctaaatgtatcagtcagtatctgagaacgtcatttagctatcactaaagacatttcttagtctgttgagaagataaactatttttagctattaacttctatctagaatgatggtgaattctataactcatttctaaacaacgaatgataaggcaggagtctgtttaagctacctaattcacacagacaaaaaggttttcatgaagacccgcacatgatgtgtataaatctaaaagatctacggggaagttcagttaagcagaatgcaaataacaacaaaactttatcagcagcattttccattagacttaaaggtaggaagaacttccagtcaatatactgcatctagtttactgacctctaaggatagaaagcatgtctcaatcatctttgaatcccaggagtttggcatagtatctggttacttaggcttccctataaacgttttatgaataagaaaaatgaagaaagaaggagggcctaacaagtaatatttcagattcacatagcataggttgtcccggagttattatacaatcataatatacaatgtgctcatgaataatgttcaaattatgtctctcatagacaataaaccatcagaagaagactgagctatacttactaaactatgtttcctaaggtctaagacaatctacaactaagtatttttaaataattttaatatgcattagaactaaaggtttttttttccacttagttctaaaattaatgaactagaatacatatgtctgtactttgaacatctcacttagttgatgaactggaatatatcccaatctttgaacattttctttgatttttttaactatataccgaattctaaaagttgtaattgtggcaattttcataaggaaagaaagccattgcttaacagactataatagtcgactgcctgataagacatgaagatgattcttgatacctttatggtttcagtgggcactccaggctctggaactttatccaagtaagtggtcaagtcttgatcgacatgttcaaacactaaagttagtttggtttctctgtctgttcgtgacactgtgcacacatcaaacaacctagaagaaaaaacaaagaggttaagtaggtggcaataagcaaagaagtaacctgtatgttttatacatatcgctcaatttggtctcataatagaaaaaaaaggccagtgttgatcatttcttgtgatcatatgtaaagatatcaaatgagatctgatactttaataacaacatgaagttcaggagaggggcactcagagtgtgcggttaagcatgagaacatctatagtaacaatgagaaagcaacgcgcttggagcacaagaacgcttggagagtttccttagttaggaccttagatagaacttgccaatggggataatttcaaaaacttgatgtctaggcaaaatatgtttcttcttagctcacagtttgagaattactagagatagattgagcatcctttggagatgctgaatgttgtaatcaagattttcctggaatttaaggtgtcacaaccatgtctgtgaaaacaaatatgatggaatatggagaaatttagtttatttctaagacagccctcatcctgctgagtcaaatcattccctggaaagggcatacattcttagtttttaaaattccaataccatgttaatcaacattgtaaaatttaaacttttttttcaggggtagggggacctgcattggtaaactatattgcccttaaataataaagcaacagattaacaaatgttttggatgggtgaatccagtttcttccataaaaatcttaaaataagacaaaatttaagttttaaaaactaagccttcaggagtcaaaagaatattcaagccaaaggacaaaatttcctttcgtttcaaccacagtacactatttagcacaacagattctcaccaaatgtttgaagaattaaactacccataaacaagctgtaagtacatttcttaacaagaatgtaatataaatactaagaaaaagctaataaaatactattcatattactttaatttttaaaaaaaattgaataaatgccttcttcaaagaaactataaatgtgcatagagtccaataactgatgcacagggttgactatcaattatcctgcttacatattacctccgttaattttttttattatattttaagttctgggatatatgtgcagaatgtgcaggtttgttacataggtatacacgtgctatggtggtttgctgcacccttcaacccatcatctacattaggtatttctcctaatgctatccctcccctaacccccccaccccgacaggccctggtgtgcgatgttcccctccctgtgtccatgtgttctcattgttcaactcccgcttatgagtgagaacatgagtgtttggttttctgttcctgtgttagtttgctgagaatgatggcttccagcttcatccatgtccctgcaaaggacatgaactcatcattttttatgagtgcatagtattccatggtgtatatgtgccacattttctttatccagtctatcattgatgggcatttgggttgattccaagtctttgctattgtgaacagtgctgcaataaacatatgtgtgcatgtgtctttacagtagaatgatttataatcctttgggtatatactcagtaatgggatcactggatcaaatggtatttctggttctagatccttaaggaattgccacactgtcttccacaatggttgaactaatttacactcccaccaacagtgtaaaagcattcctgtttctccacatcctctccagcatctgttgtttcctgactttttaatgattgccattctaactggtgtgagatggcatctcattgtggttttgatttgcatttctctaatgaacagtgatgatgagcttttttttcatatgtttgttggcctcataaatgtcttcttttgagaaaatgtctgttcatatcctttgtccactttttgatggggttgtttttttcttgtaaatttgttttaagttccctgtagattctggatattagccctttgtcagatggatagattgcaaaaattttctcccattctgtaggttgcccgttcactgatgatagtttcttttgctgtgcagaagctctttaattttattccatttgtcaattttggcttttgttgccgttgcttttggtgttttagtcatgaagtctttgcccatgcttgtgtcctgaatggtactgcctaagtttttttctagggtttttatggttttaggtcttatgtttaagtctttaatccagcttgaattactttttgtataaggtataaggaaggggtccagtttcagttttctgcatatggctagccagttttcccaacatcatttattaaatagggtatcatttccccatttcttgtttttgtcaggtttgtcaaagatcagatggttgtagatatgtgtcattctttcttgtttttttttcctttttgtgaaggagtttcgctcttgttgcccaggctggagtgcaatggcacatcttggctcaccacaacctccgcctcccaggttcaagcgattctcctgcctcagccaagtactactcccaacccgagtggctgggattacaggcatgggccaccacgcccagctaattttatatttttagtagagacggggttactccatgttggtcagactggtctcaaactcctgaccttaggtgacctgcccacctcggcctcctgaagtgttgggattacaggtgtgagccaccgtgcccagccatgtggcattatttctgaggcctctgttctgttccattggtctatatatttgttttggtaccagtaccatgctgttttggttactgtagccttgtagtatagtttaaagtcaggtagcatgatgcctccagctttgttctttttgcttaggattgtcttggctatacagactcttttttggttccatatgaaatttaaagtagttttttctaattctgtgaagaaagtcaatggtagctggatggggatagcattgaatatataaattactttaggcagtatggcgattttcacaatattgattctttgtgtccatgagcatggaatgtttttccatttgtttatgtcctctcttatttccttgagcactggtttgtggttctccttaaagaggtccttcacatcccttttgggttgtattcctaggacctctgttaaacttttaatgccttgctggttcaccatgtcatccttctgcatttctgggctttatggaccccacatttggacttctctgtgaatctatactaaattttaaaggaaacgaaaaaaaaaaaccaaaaccaaaaacaaaaaacacttaacaaaaaaaccccaccactgtaattaggttaaatctggcaggtcaaaaaacagaacaccaacaactacacatgcttcatagccagatccaagcttctttttaattatgggcagtttggggtgaattatacaactccattaaaattaaccagaatccattgaaaattttttcctcacatttatctacttctaaacattctggtttttaagttttaatatccattcctaaacttaatattttcccctaatgttacttattctggaaaattattccaataaagtaaaaactcttaacagatttattaaagatagtaccataaatcatattaagtctcacactctaaaaatatgattgctatcatgcatggatttaatatgtggaaaatttatcaaaacagttcttttgccttgataattcaagataactacaactattcacaggcttttttaagccagcttattgctattaaatccacatacttggacaacttcactcttttcttcctattgaaaaagaaaatggagttccacaatccccaactttctttatatctgttgcttgtatttttgtaataaaataaaagagcagtgaaccaaaaatggcatgtccctaaagtcaaatacaaacacagagctgtttcatactatgaccatttcagttgtgtttctgaaacattactttaaaaatatttcccattataattaatatatttagtgaaaaaattacattgcttaccactacctggaatcaatagtaattttagtaactccagttcttactgcatttatagtttatcatatatatatatatatatatataagatattatagtaatttccaaaagagaaaaaattctgacgggggcataactggagaataaagtgatcctaaaatactgctgaaacaaaaagtcatctgccccctggaccgttgtcttagaagttacctaacaaccctggcagtatgccctgttgcttcatctcactgaaaccgttttcaagcactctttgcatgacacaatttaaaaataacatctaacccacccaagttgctttcctcagagttatactgctctcttcaaaatattaagactcactgatgccacctgcagcaactggactccaggcctcagtttcaatggatgctcaagatacgaaaggtgagctcactgaagccactactaattgtcctaaatgataaaccttggagaaaaaaggactcatttcaatcggtagtttttaaaacatggaattttaaagagatgtgtaatagtccatagagcagaacattttcacataaattttaatgtatatacttgcatattcttaaaaaatggtattaggtagaagtgactcctccaggttcaaggaaataatcctttttaatttttaaggtgccattattattaacttcattcaggaaatggagcatattagagacttctcagacattcacaaagggcatcaagggacatcagagtcctaagggtgcctgtaggatactctcttttttggctccagtgctggctagccatccacatcctacagacctagtactccatggaagacatctggggaaatattgctcttcccaaaactatgaaattttgtctgacttaaattatgtctgattaatggttagtaaacattgtactaaaaattaacagttatattagtcacaatgggtaggaaatgcattttgaatcaatggttgtaaacattaatcttagaaatgctagactataatatttatgatgcttttttttgtctacaatgactccctctggaattgccccaaatcaaataatagtcactttggtgggcaataaagagaaaacagaaactttatttttattcttatttttcttttaagatggagtctcactctgttgtccaggctggagtgcagtggtgcaatcttggctcactgcaacctcctgggttcaagtgattctcctgcctcagcctcccgagtagctgggactacaggcatgcaccatcatgcctggctaatttttgtatttttagtaaggatgggtttcaccatgttggccaggctggcctcgaactcctgacctcaagtgatccacctgccttggcctcccaaagtgctgggattacaggcgtgagccactgtgcccggccagaaactttaatataacaaatgagtttcatatacaacaactgagctaagcatgaattaaaatccctggtatttggctagaggtaaacaatctgtaatgtatttatataaatcaataaggaatggggctaggctacctagaacccttacacttgcaaaacaaaagagccagacaggtctgaacacttgaatgtaaaaactggaaaataggctgggcgcggtggctcacacctgtaatcctagcactttgggagcccgaggagggcggctcacgaggtcaggagatcgagaccaacctggctaacacggtgaaaccccatctctattaaaaatacaaaaaaattagccgggcgtggtggcaggcgcctgtagtcccagctacttgggaggctgaggcaggagaatggcgtgaacctgagaggcagagcttgcagtgagccgagaccgtgccactgcactccatccagcctgggcaatgagcgagactccatctcaaaaaaaaaaaaaaaacaaaaaaacaaaaaacaacaacaacaacaaaaaaaaccaaaaaaaccccaaaaaactggaaaatagctacaactgcatgattccttatattgaccaatattttaagactttctaaaacctttttttaaaaatttttgctaatctgtaacctgacaaaaataccatttcaagaattacatgacagcagttccataagaaaaatgtaatcacaatgtattgaatatgaacaaaatatctcagatgacttttaaaggaaaggaaaattaccattaaatatttatccattagagcttagcataatgtgatccaagtgaatgttcaaaaagtcaaagtgcaaactggttattggcattaactaaggctatgccttcagtttagctgtgcaaaatgcaatccaaaaaaggcagataggtcgttatcatttcacaattaagttggccaagcccctaactctcccacaaagtaagttctcttgctgtctctattgtcctgacccgccagctgcagggcagagaacaaggcttgcagtccagcacagcactcagttttccagctgtcctagtgatgtaattatctaataacaaaatatctctctgaattaactctgcatcctacccattgtaattcttaatgactacttcctgttcatgttctcaatttaacttgctcttctggaactattgcataggcaagttgccttcatctaatggatgggattacatccaataggtttgggatttccaaagattacaatttacaaaggtctcccaaacaacatgctttgtaaacacaagccctgcctttctattgtggttacaataaaagggaaatctgtcttatttgctgtgattaaactttgacccattcacaggaagttctatgaggatttttttccggtcacttttttttcccccattctcttcaatgtttggacatcaaatagttcaagagctgagagatgtctggcacagctacctaagggccacaacaaaattctgcttgaactagagccagtatttggaatcgagaagaatttttaaaaatatctaatctcctcctcttaagtgcatgaagcatattctgtgactatgtcttgtatgcaccaaatttatgttcacacatctcactagccctacactacggatatgggccactgtattctcttttttgctcattaaatatggactctgtgtgcacttattctcaaccagcaccaaatggtatagctccaggagtatttgccaccaacaataatgtgcatgctgctagaagcaaattgcgatttcagcagcacccataaacatttaccagcacctaccatgtgcaggcactatactcagttttagagtttccaatagatatgacagatattgtttttaaaagctttactatctagttgtgggaaagaagacttacaagtaaaaatgcaggtaatgatgtatggctatgtattagtaccaaataaattctataaacactatgtacaactttatatatcacatcaagtaaatttattctacatcctattaagtaaaccacagatggtctctgcctttccatccatttacctctcctggaagccacacccttattttctgttgaggaactactcctgtcctagaatctggcaatctggttttaacagcaggggcccacggatggcatgtgaacaaccctggattgagtgatgatgaatgattcagaggtggacaggagcataataatcagtctcagaaattttgctaggacttctgggagagtaaaactctacactgggattatgaaactggcaaagtctcagcctgcagctactgatggctgtctttgccaccattttagtgaacctactatgggatgcagaagagggccagaacaagggacagtgggcaagagattccggaagacattatttccacacctgggcccagtgtgtttgatctacccctggatttattaattatgtgagtcactaaagtcagtgttttgcttatccagcttgagttgggtttttattacttgcaacaaaaaattgtcctaagacatctataaatattttgaaatgattaaatgacttaaaaatgtcaatatctggcctcaaatacgtcttacagagtagacacaatgagtgaagctcaagcacaaaagaagtagcagtgtcctcaaagtgactgtcccagttctctgacttggctgggaatctattcaccttaaatggctcctccattcgcatgtccactgggcaaaagtagccgacagcagagaaccagatcaatccatccttcccaaggagccaggcagcttcctctcagaccctacttgaggttcctgatctgaccatagagacactggatggaggaaagcacagaaggaagaagacagatggacaagtttatcacaaacaggaatgtaaaacatagagtagaaaagaactcaatggtaagaggaagcaaggagaaaaaagaacttaaaaataatacaaagatacagggttcaattaatttaaaggttgaatccagtgtgcaaggtgtgttctcctgaagccttcaattaaacaacccctttcccactagctgttgctgaaaagtggaaaaggacagggatgtcaaaccaactctaaagcacagaaatcctttgtatttaaactgttaagtttatggctgctattatctgacaagggaaggcaaaatcaacattgcttatttactaaatcattttattcctacagcctttaagagagtattcataagaaagtttcattgtttatcttctttccaactttagagttgctattaatctagtttcagcttctatctatatagacctggcactgtggctctaggagttaatatcttctgaatctgttaaccaaaaaatgttttacatgtggaatgggaatcccctaaactgggcaagtttacaagatgtgactcttgcactatagtaaattttgaaaatagagcaaacagtaaaactatgtatatggaaacacattcctaccacacgatcagcaacagaactgatgtactactagctgggcctgaaacaagctatttaggatggcttaatgggtatatgggatgcctatgtacccctctcctcattccagatcaattcctgaactggacattaaataatagaattcagcttcttccatagtcctacatacagcaagcactacaggcacttctacgtcatcaaacacaattattcaaactgctaatgcattttatctgaatgaaaggcagagaaaagagtaaggctgtagcatcactctgttatgctaactacatgctattatgggaaaaaaaaaagctttagagctgccacaaagaaggcatatcataaaatgcgatttgttgtcttgcagggaagagaatggtagcaggggcaaaatcctacttggaattaagtgaactccaagtcactaaccatgtggatcattatctccccaaagacaagagaaagataacagctaaacaatagctgttttctgtaggcagctaaacaataatcagttgataattttggtgagtccagttccaatacaaaatagatttggaagttcaaagagaacacagccaactctacaaaaagaagcgacctgccaatggagaaaattaggaactattaggtctagattagtataaagaacaattcaccaacctcagctatagatcaggaacagggcactgtttacctcttgaggtctccacctagacatgatgaacttttagtctttccttaacagttaccttcaatcagccactccaaaaacataaatatgatggacaaaataagggcctaacaagagtgaatggactgagagaccccaaaacctgtggcttttggtgagaggatggggtgaggggaactcaagtcgcaagccctactggcaggtcagagatgacagagtagcaaactaaagatagccttaaactagtggtgcctctttgcgttttgcttattcttttctttcaattctcagtggcacccacagccatgtctgatacataggtgttcaataaatatttattgaataaatgaaatttttctaaattataacttagggaaaagtcaaagtaaaataaagtaaaagtgaggatacttcaagatgtcattaggaaagcgtggcattctgagtaagccagattttgtaactgctgttaaacgaagactcaaacactaaaatattgcatttactagttaattaaaaaatcttaacaactgtatgagatggtactcattttagagacgaagaaatagacacaaatgttcactgaatgatgacgcagtgaaggtaaacaaatattcactgcggcatcattcgtgatagcccaaaactgtaaataacccaaatgtccatcaactgatgaatgcataaacaaggtgtggtatatccatacaatggaatactatttagtaatagaaagaaatgaagaacaaatacatgctatgacatggataaaccttaaagggattatgctaagagaaagaagccagtcacaaaagactatgtattccattatttcatttatatgaaatattcagagcaggtagatctatagaaatcgaaagtggatttgtggttgcctgggacaatgagcagtgggagagtgtggaggaatggggactgataatgtgtactgggtttcttcttggagtgatgaaaatttcctaaatttagatcatggtgatagctgtgcaactcagtaagtatactgacctgaagtcttacacaggtgcattttatggtatgtaaattacatctcaataaagctgtttaaaaacaaaaaatggacagcaacagtggtagagaggtttaatactttgcctaaagtacaaagacagtaagtagtggagatgggctttgaaatcagactgtctggctccagaatctgattttctaaccactctgttattctgcctctgaatgcagcacaccatttggagctgcagtgaagcagaggtcagtgatggggagactttgtgacaaatgagataccctgctgacaggcattgtgggaatgccaaagccaaaatgtttttggtaaattaaaagatcccaatacatactttacatggtgggctgaaaaaaagaagttcagaaaattcacaggaaaaatgttaaaaagcgaagactgctgatatcccaaaccctcttacatttttcccttgactagttagaaaaaaggcacacttcaattcacccgacagagcttgaaaaagagattctgatctcagaaataagtgagttaagtgtatttttaaaagcaaagcgaacagctctggcttaagtcagatagagtgtggaacattctggacaactttcaacatttagttctctgtccatttctgacctgtgaaagccctgttctccagctttgggcctctcttgaggaaaaatgactaagcagccaaaactaggcagccgcctgtaatgaagactgtctgctgtgtcttagaagaaagccaaccaagctttacctacactgtaagccaaaaacctttcataatcacatccttaataggtgagtaaattcatcccagcactaattcactcaggtacttatgattaggtactgatctaataaaacaatcactgaagttagttccttttaaggaaacttttgatcataaacatagaagaaaatgttaaaccttagtaacttaaagcaacacaaatgaaaacctcagtgaaacactaaacctttcaaactgggttaaaaacaaacttgtttaatgacaaaactgcacaacacttgtttatgaaaatgagcccacatcactgtgggaatacaaactgataaaaacctttctgaagaataatctggctctgtgtgtgtgtgtgtgtgtatacatatatatatatatatatataaataatctggctctgtgtgtgtatatatattgtatatatacacacacatacacattatatatgatatataatgtatatgtatatatatataatgtggctcttaaaataatggtactgatacatctttattgaaaatggaaagacattcacaatatattatttttaaaaatgcaagtttcaaaagagtgtgtacagtatgattccacatatgtaaacataatggtagaaagataaatcaagatgtggctgggtgcagtggctcacccctgtaatcccagcactctgggaggctgaggggggtggatcacttgaggtcaggagttcgagatcagcctggccaacatggtgaaacactctccacaaaaaatacaaaaattagctgggtgtggtggcgcatgtctgtaatctcagctactcaggaggctgaggcaggagaatcacttgaacctgggaggcggaggttgccgtgagcagaggttgtgccaccacactccaacctgggcaacagagtaagtgagactccatcacaaaaaaaaaaaaaaaaaaaaaaaatgtagccagtggctatttctgggtgataagattttggaatggttgttttctgctatttgctcatctaaactttctactgtgagaacctattaatttttaattaaaaaaattatttaaaaaataagaatcataaaagcctatttttcaattcagatttttttctcctaccactcacgtacttttcttcaatctgttcctctgaattaatgaggaaatcctaatcatcaatcctgaaatgcagttttaaaaatcaaacatgtaaaaacataaattcttttgtatttagaattgtttatgtttgtccacttagaatataaattttttgtttatgttttgttctcttagattcctgaaatctctacaaatcttaaaatattgttctaagagaaaaaataatatgtatgcattactgccgcattaaagtatgtgcttttcaatcccctcccaatatggagtgactctacaaaaaagaatatgagaaaaaattatttttctgatacttggtgaaaaaggtcaaagtaacagactaccacgaaacaaaagagaaacaacgatggctcacaaagtcttcagattactctaatgtttcttaaataaaccaagaaaaaaaatcctacatggtagaattcagtaccctttgtaacgtaacaaggtgcaagcaaccaaaataaagcttggtcaaaaataaagatccttataaaaattaaaatataacatcttatatttttaaattagatctattagagcaaaatttctgggaattattgtgttgagaactaagaaaaatgctagaaatatattctaagatcaccaatggcaaactatattaaaatattagaaaacacactgcagttggagaagctggaaaaactggtatttctaccaacttctaaacttaaggatctaaaattgggttgttttgttcaggtgcaaacacttataaaaattaaattatgatttgctatatttctataagtccattttattttagagtttgatctttgttctagaagtatctcagataataaggaaaatgtttcatggtgttaacggtaatgaaaactgtgggagataatttgtaaatgtaactgcaagtttatctatttcaaggcagacgttttcttttgcaaagaaccacaggaacacctcatatactaataatctgttagtcatctggttgtcccatgtaagtgaatattttagataattgattcttacccatcttaattccctaaactattttttaaaattaaagttttagtggaattcttggtaacatgcattgaacattttcttgactttttaagcacaatattatgtttaactggtagatgattcatggtcattactgttaccattaaattataatcatttaattctgcaccattattatgatcacttatttgagtgtttactaagtacatgcagatgagaccaaaagatccacaatgaggcacattgtaattaaactatgaaaaccaaagacaaagagagaatcttgaaagcagcaagagagaagcaactcatcacacacaagggatctgcaataagatgaacaactacttctcatcagaaactatggagggcagaaggcagtgggatggcaatttggaagtgctggaagcagccaggcatggtggctcatgcatgtaatctcaacactttgggaggcctaggcaagaggaccacttgaatctaggagtttgagacctgcctgggtaacacaaagaaccccctcatctctacaaaagattttttttttttaaattaactggtcgtggtggcacatgcttgtagtcctagctactcaggaggctgagacagaaagatcatttgagcccagaagtttgaggctacagtgaactatgactgcaccactgcactctagcctggatgtaagagtgacactctgtttctaataaataaataaagaagtgctggaagaaaaaagaaatctgttaaccaagaattctatatctggcagaaccatccttcaaagatgaaggcaaaattaagacattctcagataaacaaaagctgagggagttttttgccaatagatctgccctacaggaaatgctaaagggagtccttcaggctgaaataaaagaacattagacagtaacatggagccatatgaagaaacaaagaacactggcaaaggtaactaactacataggtaagtggtttgtaacttttaaaatatgatttaaaaaacaaatgcataggacagtaattataagtctacgttaatggccacacaacgtatgaacatgtaatttgtgacaataacaacatgaaggagaaaggacagaactgtacagaaaaaagttttatatactattaaagctgaaatagtatcaactcaaactggattgttataagttgaagatgttaattgtaatctctggggtaaccattaaaaaattctttgttttgaaactgctcatatcttgaggaacattttcttgaatttaccacttaagagcccctacagtgagcctgggactgtggcagggatttaatatatggaaacttattgaatcctttcaatatccttataaagtatatactattactctcattttacagatgaagaagctaagattcatagaataatttgttcaagcatcatagaacagagacaagaggcagaaccaagatttaaattagaaaccttcacaggcctctctccttcttgatctggaccttcaatatcaagatctcctggacctattctcttcttccccaatgtaccaccaccactatgacaatctaatcagcaacagatgacagttatctcctttatggtcacagcttcaaagagtacctagaggttggtaaatctccaacttctctctccaaaatagtactttctccaaactccatacccagttatctcttggacaacttcaaccaatactctgaacatctcaatttcaaaatgtctagaacacagttcattccccttggtgaatcacacccccatccaaataattttctaaacccagaagccttcaaataatcgtagattgtttcatttccccacatgttcaatcaaccaccaattccaccacctaaatatttttccatccactgccacttccctgagctcaggcactcaacacccttggccagttttctacaaagggcctttatcctgtttcccaaatgccctgagactctttgtactcatcccctactctggtcagtgagccttccacagtaaaaatctgatcgatagcattgaacaaatgcatttaaccagcaaacgtttattaaatatttgttattttctaagcattagattagatgctaggtatagaaaaatcaaagggtaaaataaaatttcttaagttattcagagtctagtgggaaaagtagacaaagtatcaactattctgtaaatgctgaggtatgtatgtctgcggtatacacagatacacataagtgtatacacatatacttattcaaatccgcacacacacatacacatacatctttctgtctcttatgtatatacctatggaattttaagaaatgataaaagaagcaacccatccatatgtggaggaaaactttgtagaagaaatgacaatttaactgtcagagtatcaagagttacccaagcaagtggcaaagaaagggcacttgaaaccaaagaaagtgtgagcaggagcaccgcaagaagccccattggagagaaactttgtatgctacaaagaactttgttcctctggaaagtgggcaactattttttatggttttcaaagagcccaatctgatgacatgggtaaggggaagtgtggtaagaccacctgtaaggagactgttgctgcagtagtacagggaaagtaaagaaggcctgttctaaggaattggcagcaaggatggagaggagagtacagattccagaaatatttaggaggttgagttggcaggacttgctaagtgtctaaatgtggcgggggtggagggatggggaaggagaagccaaggatgactcacatgcttttgactttggggacttggtgccaccctcatgagatacagcagtgttcccagatctttggttttcagaggcctggaaactttccaacaactttacagctctgacagaacattgccaactaaagacattaatatactctactatctactatcaatatcacttcataaataaagcatattttaatatcccaaatgtgaatagatttagctttctgaaaaatttaccacagggccctatttttctaattgcatcacagatgatggaaaattggtaccaggcctcagaccaacactgcaaagccctgaggtagaatataggagaagtcagtgcagcagtaagatgatgagttgaagtcaaaggaatagacaggcttgccctggctaactctccagccctagaggaatgtatatatattaagaattgtaaaaaagttcaaatggtgttggaggccctgaagaagaggcattcaacatacctcgaggggaagtggctggggagctgagtctcataggacagtctggaatttgccagataaacaaaggaagtttggcatggtcctggcagaaggaacagcatgtccaaaggtatgtaggtacacagaaaaattcatatttggggaattgcggatagtctggcatgatttggtgattatcttggaaaatggcaagagaagagctggaaaagtacacagaagtgaaattatgagagtttagtaatccaggctaagaagtctggaaattatcttatgggcactgggaaaaaagcaaaggacttttacaatgaacaatgctatggtaggatgtgtcacttggaaatactactctggttgcagaatggaagttggattataggagaataaaattggaggtgaggaaaacaagtaggaagtgtctgcaaaagcccaggtaaaaaatatagacagattggttacagaaatagtagcagcagagagagaccaatacaactaacaaatattgactgagcacattatactcttcagctgtctatcaggatcatcaggcaagatccctgctctcttagaacttattttctactgttgttaaacaaagttgaatcatgttttgcaattaaaaaagtttaagtgtaccaaccactttcacaaatctatctccatttttaggttgcactaaattatattctatatgtaatttattagaccatttccctgttcttgtaacattggctcattattatcttatgataaattcctagaagtggcattttaaaaataaaatgatatacactttttctgaatcaaaatatatatattttttgaaagttcttgatccaaaccacctgacagaagattgtaccaatttatactcccatagtgatatctaggaggtggaatccagaagatctggtaacctaccagaatgtacaagttgaaagagaagtttgaaatgagtttcacgttttggtttagacaaggtagatgatagtactatttccaaaggccataagaagagatgaaaataagatgagtgaagtaattaatgagctcagtctggaaaagattaatttgagatgtctgtgacattcaggtggtaaagtccaataaacaactgtaaacatatacttctcagagctccagacacaagtcaagcaatagtttgggaagttatcagcctccagatgagacggaatcttggaggcaaaacataaaacaagcagaatagcatccctagatgaatcagagaggtgagcaagaaaatagatgaagaaaatgatatcataaaacatcaagggaattaaaaaaaattcaatgtatggcatcatcaaaagcaacaaaatacgtataaatttaacaagagttctctgtacagtgaaaactacaaaacaatattgcaagaaataaaagagctaaataaatggaaggacatccgtattcatggatcaggaagacttgatattgttaagaggcaatactccccaaattgatctagagcttcaatgcaatccacatcaaaatcccagctggctttttagtaaaaattgacaagctgatcctagacttcatatgataatgcaaggaacccagaatagcaaaaaacaatcttgaaaaagaaaaacaatgttcgaagactcgcacttctcaatttcaaaacttaccatgagctgtagtacctaagacagtatggtactggcataaagataaacaaacagatcaatgaaatataatttagagtgcagaaattaactttcatgtttatgctaaatgaattttcaacaaatgtgccaagaccattcactcaggaaagaataatcttttcaacaaatgatgctgggataactggatacctacatgcaaaagaatgaaattggatcctaacctcacaatatacacagaaattaacttaaaatggatcacaaacctaaatgtaagagctaaaactataaaactcttagaaaaaaacatagcagtaaatctttgtgaccctgggttaggcaatatcttaattataacaccaaaaacataagcaatattagaaagaacagatcactacagattcatcaaaattaaaaatgttcattcatttgtaagaaatggccagagtaggcaaatctacagaaacagaaagtagattagtggctgcctaaggccaggggtgtgggggttggggaaaagtggggaatggctgctaatgggtatggggtttctttgagggagaatgaaaaggttctaaaatcagactgtttaacaatggttgcacaaccctgtaaatatagtaaaaacactgaatcaagcgctttaaatgggtgaattgctttgcatgtcaagtatgtctcaatagagctgtttaaaaaaatcaaggcaagagtcagtttcaagaagaaagaagtggtcaatggtgtatataagataaagaagtgtgttctgctctttaaaatccttctattgtcttttatccactggacaaagtagcagaagaaatagctaacacttactgagtgcttactgtgtgtcagacacaatgctaataattttgttttatgtatttaaatctctttaccctataatacaggtaccatcatctctttcacagatgagaagaattaaggtatagaagtttagtaaattgcccagcatcctaaagactgtaaatgagagagccaggatttgtactcagaaaaccaagcaagagaaccctcactcttaaacactgcataccccatcccatggcttattaggtcactcgtgatcttgccccactcgccactccatcctcatcttttattggatcctaaaaatacttacagttgctagaatgtgcgtgatttttgtgctgtgcctcaacaccagctgttactgctgcctagaaagctctctttttctctgtccatctggtgacgtccctactgatcttcaaagattatgctcacacattctccatatccttactgtctccccttccaccctccctctcccacagccaggactcctctgtgctaccacaacatacctgactcattgggggtgctcagccatgattgctgaatggatatataatatgaattaagaaaaatattcagttgtcctataagagagtgtactgtatttttggaagaagcctgaaccaagtctgataaattaagtgggggatcaggctgagtaatattcttttgggtccaaaaagaggtgtgataataaagatgttgattctttggcccataaaacgattctgaagataattccaaaagagtctgaaaatgttttgctcaattaaagtagggctagaaaaactggactgcttcccatgggaccagatttatttggtcatataagttcttgtatggagtgttttcattttctctttgtctcattattttcaagtcacatgggataaggcaattatccttttactaaacatattccatttcctaaagagcaagtctctgaaaagttattgtcgtttttcccctcatgctttctttcctcagtaactgtcttgacatgttcaagaaatattttattatcagaagggtgattttgcttatttccaaagagggaagcaatttgctacactttaatttaaacctacccttaaatccaaggaatgtttggctcatgaaagggaaaacaaggtccagaatctattaacttgtgatccacagccttcaaagcaatttacattcagtatacatttgagttcatttagctgtcagagtaaagtctaaatcctctgggtatcttgctagtaaaaaagtatactcagaccaaaactaggtcacaaaatgtgttacaatgacaatgtgtttcactcttccaacattttgagaaatttccaaggaatcacaaaaaagaaaacttcctgaaagaagtaacttcataccttaaatcacatcctagataagccctgtcccagtatggattaagggcatcattaaaacaatagaagagaactaactgtgccacagcacacattcagtcgtgctatttcttccaagtctaaatcttccaagtctaaatcaataagcctatctgtgtttaaatgtccttcaaagattttaatatccagatagtttaatttaaccagtttttcttgtgtcagaattttatagatttttacattatgcattttgaattagtttatacaaaggtttgatctaagcattagcctattaagtacatctctgttaatgtcatttactagtgtttcttagctgttactaggaggtcattctactaaagccaccttcttgtcctacatttaagtgttatttgagcataaggtcactctctgaagaatatccactgaaactaagatggaaagttgtaaacacagagcaatgctacctaaatggaggacaaaggtaacaccaccagcagctgaaattaacttggagaaaaaaaaaaaaaaactcatccaaaaaaaaaatttcacttagcatgcatgtatcagtttttttttctgtaatgagcaacagattttttgaaaaatataaccctaggaataaatatatatttatacaattttttaaaagttatagacatatggatatttaatcactaccttcttggtttgcatttctttgtttcaagtaaaagaaaaagcaaaattgacaaattagcagataacaagtagctctatgagatcatagtttttactgacttgtttcaagatacaaaaatgataacaaaccagatagtttagacagactcttagtcttttaaatcattctcatagaataatttgagagaaaataatattttataagttgctacgtgcataaatattgtttatttatcctaaacattgtttcttcagtcttggatattccacatctcttttctacattgtaaagatatacagtctatttcccttttacaattgaaagggaaaactgagttggtaagagtaggatattttccccttaactgtaaacacattattttttattcaaaagaaaatgatctctgtatcaaaattcaaaaaaaaccctcaaagtctataatttatattttagtaactgtttaatcatagaggtaaataaacagggcactttaaaatattccacttataccagttaaacttttttttaaataccactatcaagtcatgtgccaaaaatttatctccaggaggttagcttttagtcagagaagttatatcaatgaacagacagaaaagtatccataagcaggacatgagacaggtaacatggtatcccctgaactgaactgatggacaaactctaagatggaaatagggaaaaccaaaatgtggggatgaggatgatctaccaatagaaaaggcccaagagactatgaccaccccacatcgaacagactaggctgtgatgacaactaaacggtacttttacaaaaagtatgtatgttatctatagaaaagcaaactctggaaagacacaactggcagcatggctcaaccctgtcataggtgagagtttgtgaatgaaacttcctctcctacagccaaaatggatgcaactggcaccagagcttgaggctatcagacattaatctcatcagctaactcccctctccaggttccatgtccacaatgcaagtatcctactataacctggctttcccacagacaagcatgcaagggagacaatgatttggctggcagatgcaagcatacttgacatgtacagtttttactggaaaagaatgcattaacatttttgttcaaacctcagttttcttgtgaggtcgggatgagtctgtcaaccttggactcccaaaccctctatatatactaatgaaattgggcttctaggcatttagtgccaggtggatactggaacatggcaaccacatcacagaattggctccctatgtttgggcagccagccattgttctgactgcctcttaaaaaggccctggccctcagacataccttttcttcacactgtagcataatgtttctgcattttgactttaactcctacaacttttaacctataagaataaagatcaggactaccctggtttgttagaagaacttctaaagaaatcaactctttgggcagcacagatgagcacttttgaaaaggctaattgttagtttggtttatactgaattgttttggttatgaattgcctcatgggatgggaaatcccctgcagggccttgtcaaacacctcctcactctccacggaaaatcagccagacaacaacgggatcttggacaccttcgatgtgttaacactggaggtgctccagtgagcaaaactgtcccctctggaagttactggaatcactatcctgggagccactataacagatgactctacttttctcaagtgtgctagggtggaaattaaattgaaaatgactcgtcctgaatgatgacttgacttttcaagtgaattttgtcaacactgttagagaattttgttcctggctttagccatacaaagcccaaatttgtccaattcatctgatgtaagactaaacaaaggcattaatgaataaaaagcagaaaaaaaacagtgccaaaatctttgtatattttagtgcataatacatttatcttcttctaggcaaatggcatgcaacttgtttctaattcaaagaaagataatggaaaaaaactgtttacagtagaataatgtttaataattcatagcttgatgatctaatgaaattactttaaaatgccaaatgtcaaaatgctttatcaaatctcttcttttgcatttcaactctaagttaacattttgatgaaaaaggaattcaacaaatattaactgtgttttaggaaggatttgcccaacttttgctaagcccagttagcacactaatttttatagatctgctatataagagagttcttactttttataaaatgtcaccctaacaattttttaatgtctacatatcagtgaataaatccactcttattgatgaatgagggagagtctctctgttgctaagggaacccaagtgtgctgaccactttaaagtcttccacaggcttgggtccctcttaggacagccaatccctctgcttcctcctcttcaacatctagctcttccttctcctgccctctcttcctaactccagacacttcctcagcctttacttagggctcccaattcctccctgcttcacacaaatgtccttttcttgtaatagaagatcaaagctattgtcttcttctatatggatcttctgtccctcatgattcacaggaaagtgtcctcctcttcaagacgaaccctattcctcctgaactgtgcctctccacaatatgctaaatctgcaattcatcagcttttattccctttcattcaattcccctttaagtgttcccctcctggctccttctaatacacttccctatttcctcataacaacaaaaatgtttaactgtgcctatctctatcagattgtcattctgccagccacattccatgtcccccaatttactgaatgacagtctacactttgtgctacagtttctacactttgtgctacactttctcactccttagttatctattaccaggtttcccctctttctcttccagcgagatctgtctctcaaatggatagcagtaattccccactactggatgcagtctttaggctcttccacctcttggacgcacctcagataccagaatgagatgcctactcctccccgaaactctcccctcccatggcttccctgagagttttcttttacttctccctctacttctcttgtgtctgcttttctctctgcccccttttttctccttcaatcctaaatgcagagtctcaagtttccatagtctttttttttttcacttaaaatacaggatttcttgctcattcatctatttaatatacagggtcctatttgccagtgaccctgaagatctactacagacagcaactgtgtcagaggcaattttgaaccgcctgtgctgtgaaggttggcatgggtgaacaagtcacttagctggtgacagcctagtcatgtgctcagtaaccacactggggcattcgtgattttctccttattgtgggacaaattatatgcaaaagtgatattccaaatgtggggctcaaaaaagatttctatacatctcctttaagaatgccacaggttttccggattcctatctggatggagctctcaatttcctgaactttgactataactctgccttggctatttcctgaaaacacatgtaactcaacatgttcaaaactgagttcatcattgtccctccaaacctgctccttctgctgtgaatgctatttctaacagtgacatcaccatcactatcctctcactcaagcataaaaccataattcatcttgttgaccctacagctctgttcacctacacatctaactagctacccacattggccaattctaggacttaactatctctcatatgcaaaccttcctctcatttcaagggcactaccctaatttaggccaccattattttttctctctccagggaatggtcaatctcctaaccagttcacctgtctctagattccatttcaggccgctttaccctctgctatgattctgaccctatcgattgggcattatctccattcctcctcttctcctcacactgtggttaactcagcacctcaggttcgtctgccatacgtgatgtcattcatctccatgtatacgatgtgtctgtttcttttcacatcgttcttctcttgtttggagcctcattttcttgctcctgcaaattaaacttaattttgtcttctgaactggcctagaattgtgtctgtatctctgaatggtcacgatagctttattctttgtattacagtaattggcacaggtacacacacactttctctctccccactaggttataaactcacttaaagcagagattaaggaatacacaatctgacccactgtgtagtccctatagtaggtgccttgcattcagggggggctcaattaacctctgttaaaccaaaagtcatctaaggcactatttatgaacatgttctatgccatgtactgctattccctgtagcaacattaattctgggaataagatctaatatgtagctggatatcctttgcatctctgggcccatcccaaaaacatcttcgattcaggcaatctcattatccaagttctagaatggactctgaggaaacctaagaacagagacaccatagaagcaagcctcatttcttgggatgtatcctcagcctggtgagtatcaaggctctacttaattttccatccagaaaataacactttatcattttgtccaatatccagtaacttccgaaatgatggattaaaaatcattataaagcttccaaatctgttttacctttacaagcaagaaacttctcagatgtggaaccatctaagaaattctaacatgaattgtgtgagaaaagtcagtattattaaaatattttatttatatttaaatataaacaaaagaaaatagataaaaatttcaaaattagctaataacgacacttttgaatcaattgtaaattttatttcactctttttattttgattgggagcagagaacaacttttatttataacaggaattcctttctttaaacactggaattaagcttttagagaatggaatatttctgaaatttctaagaaatgaactggaaaaattgccttcaaagtttctttcttaaataactgtacatacatgcgtgctctctctctctctctatctgaaattacagggacatagaattttaaagctagaggtcatcaagccttagcccttctttttgaaaatgaggaaacaggcagggaatggttaaggtgtcctgcccaggatctctctgaactgctccctccaccataccactcttggccacataagcacctcccaaaattaatttcaagagagaaagaatattctctttccctccttccttccttcttccctcccttctctctttctctctttctttcttttggagtgcagtggtgtgatatcggttcactgtcacccccacctcccaggctcaaacaatcctcccacctcagcctcctgagtagctgggcccacaggcgtgcgccatcatgcctggctaatttttgtacatttggtagagatggggttttgccatgttgcccagactggtctcaagctcctgaccacaagtgatccacccgccttagctttccaaaagtgctgagattacaggtgtgagctgctgcgccaccccgcctctcttttcgtctcctcttctctcctcccctcccccccgttctctccccttcccttctcctttccttcccctccctccctcccttccctccttcctttcctcactttcttatttgtatatattcatggggaacaagcgcaattttgctacactgatatactgcattgtggtgaagtcagggtcttcagtgcatccatcactggtgcaacttacattgcacccatcaaacaacctctgatcatccacccctccatccagaactctgccagtctccacctctgagtctccattgtccaacattctacactctgcttccatgtgtacacattatttagggaaataatattattcttacaccttaaaaactatcaagtattcttcaaggaagcttctaaaatatttgaaaaaatggaaggaggtagatttcattcaatattctaatataactatcaatccttgcaaaggaattccagtttattaaaaatttgacctgaaattccaatacatccttctgggttagcaaatgcctctaattttctaaaattatgggctatgtgcattcagtattaagagaattctgtctacttaacaatcattctctcctctcaaagtccaggccaaagacataaagtgctcgtttacggtacaagcagctatcacatgtcttttaaactatccgactgttctgctttatgtacacagctgcagttcccaccgtttaggagtttacaatatatgatcatttcctctatataaaaatgcactactttttgcatgctttcattcctttaggtggtaaagtatgttaatgatggtgcccactcaatgctgtaaattagggtttctcaaccatggagctattgatatctgaggctggataacactgttatggggatactgtcttgtgcactgtagaatgtttagcagcttccctcacctctactcactaaatactaatcatatccctccatttgtgacaaccaaaaatatctggaaatgttgccaaatgtcccctaggagcaaaactgccttcagttgagaactactactatagagggccaattcgtcattctgcgttcttacagtttttcaaatatgcccttcccatgtacacccaatattaagatgactggcagtaattaatcttttcaagtacttcttgtataataactaatattatactgtatttgtacatatcatttcaatgacatttttaaagaaataggctatcttgcacaatcaaccacataataagcacttattaagtacttgcaatatggttagcagtatgtgaaccttcaataagtcacaggttttgcttacaaggagctttccctatagatgaggaaagaagacatgcacatgtgaataactaaggacactgtaggacaagatataacacaacactaaaccaggtgatataaacttcacaagggaggagtgaacgttagtactaaagttttcagaaatgctcccatggagctgatgacagccaggtgcaacctttgaagatgagtgaatatcacataggtaacaaggagaagagcaagtaagccatggagggcagccacatgaaccaggctggttggagagagcaagcaggctccgtttgagagccatgagggcagagtccccatttagaggacagtgtgggacatgaacatgtaagacggatacagatcacgaagagctttggaccacaaatcaaaaagtctgggtttgagatggtagacattcaagaccattttggggcacatgtgtgatgtgggaagaaggcatcatatgaactggaacataacccaaacgagagagagaaaaaagttactcatacaggtttatattgattgactcccgggacagtatgaaaagggggaaaaaatgggcaccaggaaatgttttaaagggaaaatctattagacttggttaatatcaaactatgacaagtaggataaattaatcttcaaggttcaagtctggatgagtagaaaaagaagtaaagcctcaacctatataagccatctaccgtattcatagatctcaatattacctaccttaattaatcttaagagtcacttctccactggtttgtttcatttgatcacctcatatagattagtgacattttataaatggaggcatgaaaagaaaaatataaaacataatataccaaccatatacattaggacaattgagaacagagatgaggcaatgcattcataatttagagggagctctgatttgaggtcttggttgcctggaattacctagaccctttcacttgagggtatgcatcccctcttataagaaccagtcactgagctaacccattccttaggcctcattctagttagcttccttttttaaacccctgattccctagcagggtccaaatacaactaattcacaaatttagccaaccaaaacaaatcaacaacaatttcaacaaccttcaccgtggattctagttctgagccacactcttaaggaaatctcacattttccagttgtctttaactccgtccatttcagccatctcacctcgctcccaatcaaacaattgtgggaaaagactatccttactcttggttttcctcttcttgcctattgatggtaatgaaaaatactaatattaggagtgctaattatatgaatgtgagcttgttaatgctagatggttggacttatgtgttttttccaatttatgctgcagacctttataattttttgccttctacaaattgttgttaactagtgtctttttgaaatgcagagctctgaatctcaggactatcagcattttgaaatttgtttgttgtggggagccatcctgtgcattgcaggatacttaacatcaataacctctacctattagatgttagtggcagtagtcgcagcactagtaacatctataaactctaccgccccagttgtgataaacaaaatgtgttcaaagactgtcaaatcccctggggaacaaattcacccctggttcaagaccactgctgtaatgtgatcttgggggacaaatactggtcatgtactgtttgtataattctaggttcaaagactgaacgaatgagtagaaaaattagataacctattaactctgaaagcctataatttcttaacctctaaataaacatattgccttctctcttgattcaaagagcttgaaatctcgatgaaggaaaattggccacatagcctatgcccttaaagtaggcatactaagaggggcatggctagacttgggatgagttggagactgaatcatgtaatctgcccactccacacccttcaccaccatcacgttgccacttcccttggctcaagtcactcaggatcaaagagatgctgctttgggggttagttggtaaaagcatcagcttgtgaggtaattatatgtaaggtatctcctagccatcataaagtcatacagcatttcttctcaatggtttaaaataaaaatccattttccgtcatgctgttccaacttttcactctgaaagcatgattttcccaccaaaatgagtgagctcaagatgtcactatggtcaagactgataatgttcatccatgaaacctactcttcataaactccctcagtgtaatcatgatgtgctatagttgaaattggaaaggatgttatgaccaaaaaaaaactaccatgaagtcttggcatgcagttttataccggtctagtaacacctacatggcttcaaaaggcttagtaaaacttcgaaacgatttaagaactatcctaaagcactccacagaggctcctggtatccagaacccctgttccaggagaccagaagtgtaatgattctcatgaaccttgttccccccgtacaataaaatccctctttcttgagctagtttcagtgggtctctattatttccaatctgaaccctaaggttactggctatggcataaactacctaccggttctcttctgattttaaaatgttatttaaaaatgtatcttcttgtaggggaaggggagtgaagagtcattgtttagtgagtacaaaatttcagtttgggatgatgaaaaagttctggagatagcagtgatggttgcacaacaatgtgaatgtacttaatgtcaccgcattatacatttaaaaatgattaaaactgtaaattgtatgttatgtttattgaccacatatgttatgtatattacctttatttaccacaataaaataagtttttaaaaaatctatcttcttgaaaaaagcatgattgaaatacactgtctacagaagcttctaatcctcaacgtgagataaacctagatagttggggcttttcttcctatacttatgaatataaatagaagtatgttcccaactctcccaaaattcagtaaagtgttctgagcctgtatccaggactatcaaagacgcccgttaaaacatgtacaattgtagattctgaagtgatcttttgttttgtcagtgattccccccaccatccctttacttttatcactacttatcactttattagcatctttataaaacgatgtaataaagtgcaaaatggatatgcacgtgtccacatgcaaagaggcagaccctggtgggaaggagtggaggatgtcagggaggaatgaagaacctaattttgtaaattgattaccacttacctatacatttaaagcagtcagttcatgttataacatgacaaaaatgtctgtgtaaccagatgacgggcacaggatatcgtgtatattaatgccaacaataaaaaccaatagaaattttgcaacatgcggaacagaccgacttctcttgttagcatgccaagtataacaactcctttgttcactctgacattcagagcactagacagaaaggctgtgagcctttacctgcgcttcactgcatttcttcattttgataacaactgttttatccatatttttctaccgtaagaccataagctagatgaatgcaagaaaaatttactttgtgtttcccacaagagacataatacgaagaggacaaacaaatacacatttatttaggttttgggcaagaggtcaacaatttaagataagccatactgaagttgtagcttataccaattttggagctgaactagttttaattctgtatcactcccttgaactttttggtttgttcaccacctgtcctctgttccccttaacctcatttattctttctacctaatcttgagagcctctagatccagaagtttttgccatatgaatttttacccttccatgatatttttaaaactttaagaaatcatttgttttcttaatttgatctcttctaatttggtcatcttttactctatctactttctgaaagtagatctatatctatatggagacatgtatatctatatctagagatatctatatctagatagagagatgtatatatctccagatttctgtatctatatctagatatctagattatatatctgtatctagagatatctatctagatatagatagatatacatctctttatctagacatagatacacatctccttataaatatatctacataattatatgtaagtttatatctatctaaaaataaaatgtatttaactctgcatctctctatatagatatatatcaatatatataataggtatagatataaatacatattatttttcttctggtttctcattattttattctccacctaaacttcctgcttgcccttcactagtactatctcaacctttccctccataaataaatttaaaaagtgaaattttatacctaaccaagcataattcagcaattgacttcgtgtttccattggacatgacacaaggccttctcttatctatcatgatgaacagtcaaacggtataaccaagcgaaaattttattaactataattctctagtagcaagcataggcatcattcatcataactaccattttattagggtacaataaaggatatatcttgaagtatcttctcaatgctcaacaaagattaaattatgagttttagtgttaagtgtattttatcacattctaatcctttgaaaaggggactcagaagagatggcaactttctaataactaagctttcttattaactggactgctctattcctcaattacgcaagttaacagatgactcccctgtaaattaaaaagaaaataaaaaaaactagacacctcatatggtatttttcttctttatgtttagtgatagttaagtagaactcctgctattgctcaatacacagaacactcattaaatcagcagatgagtaaaatgcaaagtgaaccaaaatgccagttactgtgttgctgcggggcagcatcagaagcctgcagtctgaagcatatgctcccaattctcagatttctatagcagcatctgagagaacacacaagaaaagagggaggtttctttgcttttgcctatattggccagtattctcacatttagaatgcttgataccataaggtatagtcggccaaatagtttggtagaaatgttacagacagatctgaaacaaatgattcacttaaagtgccttctataaagtaaatgctgcttaaataattcactattaattggacaggtattctgcctagtaaaaactgtgtttgtatattctgtttatctatcttcttgcattatttgctatttatttaaatcatcaatggagttaaatccaatgtgcaattttccaatgtcctgagcccttctgaaaattgtatgctttggaatgaaattcttcatgtgatttctcaagtattttgaggtagggtggttagatgaacaaccagaacataacccattttcagctgggaggatagtcaaataaacaaaaatatgtttctgaatgaaagatattcaaaggaatacatattactgcatattttcagtatgattatgtaacaagactccatttcaaagctaactttttgtttggattacatgtgcaaaaaggtcagggctatgttttctgtaggaatttttacttttgcttatttggaagcagttaaagggccagaaatcctggctatttagaggcctctgtaaagatgaaaacacataaacacatttaacaataaatatttgtattttaaatataggcatatttttgctatactatagctatttccttcactgcaaaccactggtttaagatttcctttaataatgaagatatatttctaaagaaatatatctagataatctataaaatggtttttaaattgtttcataaattgtaaaacaaattggctgtcaacatggagaaactctcaatagcccaggaaaactcaggcttaaaaagtttcaaggtttcctggaactttcaatgttttctgaaaattttcatctccaaatgtgctcaatgttaataattttagagtctaaaaattgtggctgatcctaaatataaaactaattgacaacgacaatctggtttcactcatggtagacctattctggaccattcagaaagtgatgagggacccaaggggcagatccacaattaccttcccttacttggccttactggtcactaagcctttcctaaaaccaaagctgcaaacagtgcaactgaagtttgaactccatttccttccactcctgccctacttattaggttgcacagaaacaataaaagaccaaatgagttatagcaggactgctcttacttgagaggtaagggtatatttatttatagtccagggtcaaagctacttccttagattgtgaccatcttaagaacaaaaagtatctaatccagtgtgaaatataatggttcatacctagtaccattaactaattaaaaacagaaaggaaagactgcaaatttttgatgatgaagaaaccaaaggttccctgaaactctcagtttgaaccaaggtcattcgatatcattagccagagtgtggctgaaaagagaaaccaggaagtgctgagtcatcgtgagcatatgcaacatcctcgtcagcacttctggtgccagattcaaaggtatgcgtacttcctttgacctgctactcttccatccttttctcagtaacgcagggtaggtcatggaaagctaactgccaccaagttgagaagcagcatgaaccctaacaaataacactacttaacactgtcaattctatatgctggtctctagatatggctatgaaaatagattgtttgaaaatatatatgcgtgtgtatgtgtgtgtatatgtatatcatttactatctgtcagaattaagccattatacctctagtttccagtaagtcaagatagcttcctcttcaaataaacagcatgcctttgtcagcatgcagtttatgtgcatttaatttgccaagcaggtcttactaaaacagtcaaatccaaatgacctttgcatgactgaaacacttgtagtattaggtagaaaaactatataataggggaaataacaccctggagtcaaaaggcttgtggtctagtcctgactctgccagcagacagttgaccttgagcaagtcatttacgttgtctgtttctttatctgcaagacgggaataacaatcctcccccagtctccctcactgctgctgtgaacgtaattatattaacagcacttaagaagtagacaactgtcatgacgaaaagaagtgatgaattcattacatattttttaaaaaacaaaacttcagtctcaggctagcttctatgcattttattagaaacatacaataattttactggatttgaatgtttaagttgtcacccaggttggaagtgacataagaagataaacagtaatagtaagtagatgggcagaattcaatagtaaagggctatataaatatacttcaaaaaaagcaattataggccgggtgcagtggctcacgcctgtaatcccagcactttgggaggctgaggtgggcggatcacgaggtcaagagattgagaccatcctagccaacatggcgaaaccccatctaaaaatacaacaattagctgggcatggtggtgcgtgcctgtagtcccagctactcaggagggtgaggcaggagaattgcttgaacccaggaggcggaggttgcagtgagccgagatcgcgcccggtgacagaatgagaacccccccagcgccaaagaaaaaaaaaggcaattatataggagaaatatcaaaataatactttattgagagaaagaaaatttgaagtaacataaataatcagtacccagcattttctcatagaatttccacaggtctccagcattgctttctgcagtattttactcattggacattcttcagctatataaataagcattgtgaacgagcctgggattcaactacagttataatgttgtatctactagaaatcctgagtgctcaaaccccaatgtagcagggtactttaggcaaacatcgttttagtcccttcaccatccttgtacactgagacacgtggctgaaaatatttacgccctccttaccgtgtgtaaaaacaaaatgaaaagattctttcttggcctttgactctcagaaggaagaacaaactggggtggcttcgagtgaacagtcttgagattaaatgtggaaataattatagcacttgaagatggcagaaggtggcattcaagatgacagtgtaactccatctaatagcaaccatttgttgaacagctcctatgtccgtagtacctatgccttgcccttgcaactactacctgatataatgtcacacttaaccagagaaaaagtaggcagacttgagagattcctaatggacttaatcattttgtccaagagaatgagagatgcacataatattagaatttgaagattttgtcaagttctgccaccaatcctattaacaaaaccacccccctacaaaatattctgaaggagaggaataagtaaggcaactaagtacttgacaagtatcaaacacttaaaagggcgaggcgcagcagctcatgtctgtaatcccagcactttgggaggctaaggctggaggatcatgaggtcaggagttcgagatcagcctgaccaacactgtgaaaccctgtctctactaaaaatacaaaaattagctatgtgcctgtaatcccagctactcaggaggctgaggcaggagaatcgcttgaacttgggaggtggagattgcaatcagccaagatggtgccattgcactctggcctgagcaacagagtgagactccaactcaaaaaaacaaaacaaaacaaaacaaaacacttaaaaggtacctaacttcagagacatcacttaatatgtgtcctaattttacaaatgaagacattgaagcttagaggtaggaagcataatggggttaagacacatagtcatgtggcagaactggaatgtgaacccacatttgacctcctctcttaggtaatcaataatatccaataatcaataagtaatagtgtttgttatttctgaggcccatgtgtagcttcagacttttaatttaaattttctcattcaattttttttttttttgagacagggtcttgctctgtctcccaggttggggtcaagtggtgtgatcatggctcactgcagcctcaaactcctaggctcaagccttgatcttcccacctcagcctccagagtagccgggaccagaggtgagtgccactatacctggctaaattttaggaaatattttttgtagaaatgaggtctcactacgttgcccaggctggtctcaaattcctggcctcaagcaatcctcccacctcagcctcccaaggtgctgggattacacacatgagccactgtgcctggcccacactcaaactttttaagatgacagcacagtacctttcacaaggatatcatatattgaattactgagctgtggttcaaaagtttgttcatggtttaccgtacagacattaaccactgctcaatcatttctaaaaacatatataaagttgatgccaattcacaatcaccagaatttatttttaattgtcatactaatttggtgatcagaccctcttctatgtcagaaacaaagggcatatatgtgagttgactgcagccttctgacaaggagcaattttcttctaagtaagttacaactaaattcccagccttggtctgtacacccatgatctaacaactttttttgcctttctcaacagtggccaagaaaatatatgcaattcatagtaattcatgatttgggattttatttctatgtaaaatgggataatttttaaggaccctgaagtcctttaaatcacaaatcactttagggtagcagtctattcctgccagaattcgtttactggaattacaaagtaaataaccgtgaaaagaagatggaggtgaaaatcaaggttgtagagaatttgagagggaaacagaaagggaatcatactgcttgcttttaaaaaaaaaatgcaccaaagctttcttcattcaagcagttggttttgttccctaactggtcccccacatatctaagtgcaatgagtacattcccaactcctactgccaagttaaaatgaaaacgttctcagtctagaaatgattgaggtggttttctttaatcaaattagagcagccaaatgttcctttcaaaggtaactgtctactctgcagctgtatgcaaactaccacatcaaatgtgagggaaaaaatagcgatagaattgtgtccttacagtacagagctagctgcagagatggagaaacaaaagcatttgtacagttaagaattacattcacagtgagcttccagaaatatgctgacttcacaaactgtgaacaatgtattgaaacttccagtacataattagctattttggggaggggaggaacatggggggaaatgcccccttaaaaacggctaagcagcaatagataccttgagtcatttaccctcccaaccaaagtttctcaatgagaaacattaaaagactggctgagacttcataggaaaaaaaagtctcatagaccttgctttttcacttcctgtctccatcaaaaacacaccacagtgagtaaacttgagtatcccgcaagcttcaattaagcttgtaatgattcatttgcatgcagaatttattcttttaaataatcagacatgggaatttcctgcaaagaattaattcatagtgggcttattttttcagtttgtttcccttaagaaaaatcaattggctaacattcccaatatgatgtcaaattagcttttctatgttacaatttatatcagctgttggtttcagggatggtatatcaacagtatgaaaacctagaagatgacaatgaatttatatagccaggtgcaatcagcaacagaagaatgaaacaatgttctttcttcaattatggatcctctccagatggttatactgtcctctaaattaaggaatgtggaataaataggggaaaagtatatctcatgtgatcccaatatttctccagagcagctgttcttaaacttttttgcttctggtgaaattagcagacaacttccttggttcacatgccctttgacattacccaaatttaagaactgctgcataacaaaaacttcccgcaggtaataagcaattcttgggctgcagcccttctgctcccaaccaggaaagcaaactgaattgcaaaaaaaaaaaaaaaaaaaagacattttgattattcaaaaatttattttaagaagtgtaatcagacttccagttcaaaatggtggacctatcacaaatatttgcctccattctttctcagtaaaagaaataaacccataattacaaaagggcgtcccacatacacaaaaaggagagaatttagtaaatttgctgggtgactgaaaataaacagaaataaggtgatggaagaagtcaccaaagagatagtagtctccaaagtgaagaacatataatcaggagatgtattaagaaaatatcttctatttttaggtattttgtaccccttcatttcaaaatcattatttttattaaatatataataatatatctgtatatgtacataatttttataattcagtgaatatcagtgacatgctcaaatatttttactagaagggaggccactgccctagaacaagccatgagggcaccgtggaggaagcagaagctggactacgagtcaacaggtgcaatggaaaaagggaggaagaagggcagccattttcttcccacattcaggggagtcaactaaatgtctgtatatagggtaactgcaccagttagcattcctattgccatccctgtacctaagatcttggagtaaaccatttcttattgtgacatttgagagtttttccacatcctgacagccatttttccagccacccaaaagtaaagcctgtgaagcatactcccatcccaagattcctatgccaaacaagtctcccaaaaattttactcagaaatgagagccagcagggaggaaaagatcctatttaatagtcttactagctaaccagtctttataaaaactaatggacatacaaggcagtaagggagcaagaaggtccagacttcttacctgccagaaacaactagaaactagataaacatatgaaacaactgctttcagatattggactataggtagtagaggactgtgatccctgagagaggggaagcaaatgaggtgagccctagattgccctagctttctgtttggaggcaatttccagaccacaggtacaggaaggaggaacctcagagttctgtaaattctgtagtcttgcccagctgggtaggcagagatcagagttgagaagacaaggaggccaaagtggctaaaatttggaagacacaatactgaagaagagctccagaaatctacatggggtctattgagtccctggctgaatattaagctacacatgtggaactgcatgaagtcaagaaaggtcagcttctgagaaaagatcaccaaggagttgtaagatgaatgattccagagctcacagagggcagaaaatgtttcaaactccttaccagccaaagaagagagactacaaaagagtaatgtcttagtagggctaaactagcctggaagcaaagcctacatacactagatcctctccccaacaacaaaagagacaaactaaaaataagccttggaagtataaaactgaaccacacataactttactgcctgccagaacaaaatccaattctctttaaaggagtagaacaaaatccagcagttgacaatgtcatagtcacaatgtttggcatccaataacacattattagacatgcagccatacagaacatgacccataagcaggagaaaaatcagtcaatagaaatagactcagaaatgacagaacttatggaatagcagacaaagaaattaaataaactattataaacactacaaaaatgcccaaggccttaaaggaaaacatggacacagtgaggagaaaattggaaatatataaataaaaaatcaaatggaacaagtaccaagataagctatatgttggaccaaagcaagtgttactatctttaaaaagtattagaatcatacagaattgttctctgatcacaacagaattagacagaaagaaattagaaaaatcccttacatgtttggaaatttaagaatccatggattaaagaatatataactaaaaatggcttaaaataacccaaattgaatgaaaattaagccacaacatattcaaatttgtgggaagatgcatatatttgaagatccaagcttctattttaagaagctaaaactaagaacaaattaaacccaatgtaagtaggaaaagaagataaaaacaaaataagtatcaagagaccacagacaaacagaagtgaaaattaatgaaacaaaaaactggattatcatcaataaaactgacaaaactctatctgtatgtcaagataaaaagaggaaaatgcaaattaccaatatcaggaataaaagagtggacatcactacatattctacagacattaaaaaagataaggagttaaagaatctataccaataaactaccacccccccaaaaaaaccctaggatagacaaatcccttgaaaaatacaaaattataaaaggtgatctaacctataaggtctcatatctattaagaaaatataatttgtagttaataacctactcaaaaataaatgctaggcccagatgacttcattagtaaattctgttaaatgtttaagaaagaaagaatgccaatcctacacaaaatctttcagaaaatagaagaggaagaaacacttctcaactcgttttatgaagccagcattacctcagaacaaaaatcagagttattataaaaaaaattataggccaatatcattcatgaatattcttaacaaaattttagcaatatataaaaaggctacatcatgaccaagtagggtttatcccaggaatgtgagcttggtttaactttcaaaattcaatcagtataattcacagcacaataacagagtttttaaaaaaataatcaattcaattcttcagaaaaaacactgacaaaattcagtacccaatcatgaaaaactctctaagcaaactaggaatataagggaacttcatcaatctgataaaggacacctaggaaaacttacagctaacatcatactttagggcaaaagtctgaatagttttctccttattattgggaacaagccaaaaacatctgctctcaccacttttatttgacatttttctagaggttctagccagggcaaaaaaagaaaggaaaagaaataaaagacatatatatatataggggggaaagtacaactgtctattctcagatgatgtgtctgtgtatgtaaaaaaactaaaatttacaaagaagctaccagactaataagggagtttttcagatcacaagacacaaggtcactatacaaaaaagactatagctctcaatgacaaacacttaaaaagaaaaaacaatgccttttacaataacatccaaaaacattaaatgcaaagagataaatttaataaaatgcaagcaagggcattacactaaaagctacaaaactctgatgagagaaattaaagacctaaataaatgaagagatacaccatgttcgtgatcagaagtcagtgtcaatatctatgccttcgccctaattaatagagattaaatgctatcccaataggagaatttttgtgttaactaacaagctgactctaaaatttatatgaaaatacaaaagaagagcaacaacaattttgaaaaacaagaacaaagctggaaaatgtatactacctgattaagacctatacattatagtaatcaaagtatgacattggcaaaaggatagatatatagatcaatgcaaaagaacaaagagtctaaaaacaggcccaaatgtatatgctcaactaatgtttagcaaagctgccaaggtaattcaaaatgaagaaagcaaagtattttcaataaatggtgcggaaatagctggatatccatacaggaaaaatgaacctgaactcttagctcaagccaaacacaaagacttgacttgaatgcatcacaaatctaaaataaaagcaaaaactataaaattctagaagaaaacataggaaaaatcctatatgccctggaggtaaacaaatatttattagataggatacaaaaaagcataagctatcaaagaaaaaaaaagatgaattggacttaggttaaattaaaatattctgtttgacataaagcattaaggaaatgaaaaggtaagccaaagacctgaagaaaatatttgtaatccatgtagctgacaaaagactgctcaagaactcttacaatacaataagataactcaattttaaaaaacggtcaatttgaacagaaacttcccaacagaaggtatcagaatggtcaatagccaaatgaaaagatattcaacaacattagtcatcaagtaaatgcaaattaaaatcacaatgtgttattagttcacactcactatagaatgactaaaaataaaaagattgacagtcccaagtgttcaggagggtgcaaatcaaatggaacctttatacactagcactggaaatggaacaaccagtttggagaagtttgacaatttcttaaaaattaaatacacaattgccataccagtcagcaatctacctgtaggtatttaccatacaaatgaagcatatgtcatatcaatacaaagacctgtacacaaatattcacaacagccttatttataacagccctaaactggaaacaacagaaatgatcatcagcaggtgaatgaataaacaaattgtggtaaatccatataatggaaaatgaactactcaaacagtcaacaacataaatgaatctcaaaaacactatcaatgaaagccagatataatagaacataatactctttgatactgtgtatatgaaactctagaaaggacaaatctataatgacagaaagaagattaggttggcaggggtcctggtagagggaggagattcactgcaaagggccctgtgggataatgcgagtattttagatattgattgtggtggtggttagtaggtgaataaatttgtcgaaactcataaaaagcacacacttaaaatgggtgtattttactgtataaaaattatacctttagctcgttttgactttaaaaaagccaaaggatattcaaagatcaccaggcatttaaaaaattcagccacaggaaaaacaaaaaagttaaccaaaaaaactaaacactgacagaaacagagataatgtggaggactttaaaaaaattcacagtaattcaaagaaatattacagaaaaccagaggaggatgctttaaaaaccaacaagtggagaacaaaaaatgatgttttgaagttaaaaatattaattactgagagtaaattcagtagacatttggaaaataatatagaagtttctttagaatacaaagcaaaaaccagagaaaagagatgaattagaaaaaagattaaaagaagagacacagagatcccaactgcaagatcaaatatctgactaacagaagaaccttgtaaagagaatagaacaaatgatgaagaagcagccattaaaaaaaataaaacgaagcaaatctgcacttagaaagattccacagaatgcccagcaaattaaatggtggcgggaaacccaccatatgtagacacatagtatttctggagaacacagattgtgataaaggcaaacatggcaagaaaaaataaaaaggcaattagaaactccaggaaaaacaaaatgatacaagaaagtcatggcctgaataaaaagtacacgaaaatagggcatattttaaacaagtgatgcagaataaggaaagagaatccagatgtctgtttttacaaaagaaggactccatcagcttcatagggttataatgttgaacctggagagaaggaaacataagggctgaatatttggcctagcactgaactctctctatatagtcagaagaatgtaagcactgtttaccagtgttcaacttgcaagggtcaacctttagaaaagcagggaagcctctgttgcagtacggaacagaatgcaaataaacaattttagcaaagtagctgatagaaattgtgatgttaaagggagaacataagtggaagaaaggttacggggataaaatattctcctcttactaaatggagaatcaagagatactgcccaaagtgaaagtatgaaaaattgaagtttagggatattatttaaaattattatatgaaataaaaatatccctatctcacagaaagcgaaggaaatacacagtaatattaacaaggtaagtcctcatttttcagagtagaaagtcaatagatattactgaagtttaaatatcaagaactagagcaacagcatattatctaaatttatggagaccataaacagaagcaccaaaaacagacagtgaaaagaagctgtatctgagtactgggaataggaatagctgtatctgagaactggggcaggagctttgcctttttatcataagccctttcatactatttagtattagtattaatgtcatgattacaaaaaagctgggggtgggggggtggaaattctttaacattccttccattaagaggtggtgtatgtctctacctcttgaatctctggggctttgaactcaaatataaacaacaaaacgtggcataattaacactgcttgttctcagggacaccaacttttaaagccatgagccaacatgtacattcaactattctgaagctttgatgctgaaagggaagcccaggccacctggtgtaggtcagtgtaggtgctctgctcaaaaacctgagttcagatcccagccttcgccaaccaacttgcatgaaccaccaggcttgaaagtgaagacgcctagaataatcaaactaccagtttttgagtaatttccagctaatgtcccagacatcttggaacagagatatgccattctcactgtgctctgtctgaattccccacctgctaaattcatgaatataagataatggttgttttaagcccctacatgttggagtaatttactacaagcaatattaaccagaaaaattgctttaatagaaaaatgtaattattttaaacaaaaaactgcaaataactctcctcacctgcaaactttggtactctactttattaacaacttccttgaaacatatctgacaactgactgggaacaccacaattttttttcttttctattctattactcactccctctcttcattccttctttccctttcttttccttaattctttcattactatatatattgtataaattatgttatatatataattagtttattgctatgtaataatatattagtattatcagtgatgtcacaacccattacgtgatcacaatcagctgttctaagcagaggaggaaggtgcttggaatggtagccccaaacagaagtaatgggacaaggttcataatgggactggccacttgggcttcactgcttataaaggcagtgatagccatttatacaaggctctttaggggaatgcatgtcaatattttaatatgacatacatattacatggacatccctacttgtaaggacagctatggccattaatataaggctctttagggaaatataaaatatgactctttagaagtcatattttaatataactaattttacagtaaaacaaaaatgagcagtcacagcccagagaatcttaaaccatgttcacaaacttccatcaaaacatgtaaattcaatctgcaaaaactgatatgatgatttaaaatatcactaaaatatcaatattattggcataaaattatgttcgtaatttaatgaaaacagtagtggatgaattagcttagaaagggtatatctcattgtccaatctacttgccaatcattacattattaaataactcctaattcccaggtcagaatccaatttactacctattagagactacataattttgaagagttttaaatgcaatactgagtgaatagaaaaataaaatatctaataaattgtagtgttaatttacatttttactgtcaataaagttgctgtgaaaacagtaatcttgagtcatggcttaactatttattcactcagtcatttactcaattgatatttactaggaactgttctggatgctggagataatgcgtgagcaaaacaaaaatttttgccctcagggagcctatattctaatgggaagctgacattcaacattaattcatacaactattcaacaggtaattgagtgctaggcacacggggcaatgcaaaaatgattaaaataaggtgcccaagaaaaagcagacagcaatgccattttatttttgcagaattgtaagaatgataatctgagtttactcgttccataagcactggtttgagggttttctaaatatggcagaattttcatctactttcagatcaccaggtttcagagtttgaagtttatcaagaaacttcagatctactcactatcccaagttctcttactgttttttctattttctctctcattgctaccttaacttagcttatcttctaccaccgtcttcccttcttttaatgagcatgttgtcctttcagatacataaatacaactccagaccattttctatttgcctaatgatggattcacctcttacttttatcaactaaagtgaaaaaaaaaaaaaccaaacctataccatctttcctaaacaaagatgtttctcttgactcatctcaaaagtctagtttttctaggattggattggtaccaccgagtcagtcacattcatacagctctccttgaaatcagttccatcactttgagtcagtcaatacttgagtagtaatgtctgtgaaacagacttcttcccttcacaaaactttagctgagaaccaagtggcatcagttctcatctaatcagctagaagttaaatagccactgattaagtttcatgggcttaaaataatttgtaagaattagcagaatgttaccactcttcttttgagtcttaatatgtaaaaaaaaaaaaaaaaaaaaaaaaaaaagtcatttcaaagaagctatgttctcccaggtcaagggaacttacataatttgaatgtatttcattcatgatcagcactgggagtcccttctagccccaatctccaaacctgtctcttggtttctcaaggttcaacaagaaaatatcccattttaacccaagattatttaataactttttaaagtgattctacatggttgaaatgtatactatatcagctaaaactcccaacttgaaacgactcagacagtctcttgggttcttctaaaaagttttaaaatgtactggtctgagtaaactaaacttttaaactaaagtttaaaagtctacccttgaaatgcaaagatgtcttttttcagaaaaagtttttattatttgtagagacagggtctccctatgttgcccagtctggtctctaacttctaggctcaagcaatcttcccatcctagccttccaaagtgctagaattacaggtgtgagccactgtgcctggccttcttttgtttttcttgctctgctgctggaaaggtgtgagagttaatgttcctaacattatactttgaaccttctaaaaataaaagtattttaggataaatgaatgtttttttttaatcattaggaacacctaccacagaaattatgagattactttgcaataaaaggaagcaaaggaaaaaaaaaaagcaaattcactaaagattagtgcccctaaaaaagaactgcttcattgctgtgaatagaactcttaacgatttaaacagaggacacagaacaaaattttaaatgtcataagtcagtcacgccataggaacagcctcagaaaataaacaagcagaaattccaaagtatgacaaaaatgaataattctctttgagattttgaaattaaaaaataaaagaaagaaagaacaagcaaagaatccaactcctctttgggttaatttgaatagtcaaatacagaagaaatcatcaagctcccatcagttttgacaatgtgttctcagcagcatttggtccacagatactctcacaataaacccattaataaacaggaaagaccactgggtaaacacgacaccaatatccaatacccaaatgaaagattattttttactttaattactataaactcaatacacatcttttcagaagtacctagctccattcatactttcacaacgtgaggtggaatgaaagtgctaccaatcagtaatacagatatctgtgtacatgtcagtttcttccaggaaattataaactacttgaaagcaggaattcattttgttaataataccttatatttgtataatattggatctttgtatacataatttcatttgatcagagtaaaccactaaggtctaaagagcagtagtaatttctatttttattgtggggatatggcagccaagagacatgaggaatttaccctaggttactcaactattaaataataagcagaggaatcaggataagaatcagttttctgactcctagcccacaagcaggaacatttgaaaaacttattatggaaaatttcaaacatatataaatgcagagagactagtacaataaaactccacagtttcaacagtgatcaactcatagttcattcttattgcatctctaccccattgtgaaacaaattgcagaccacataccattttttgggtaaacatttcaatatgcactttttgtgactactgccttaatcccatttaacaaagcgttgaatataacagatactcataaatacttgctgaatgccagagacctcacctgtattttcagacatgattactcatttctaactaaaaaaaattaaattctgaatttctaaatggcgcatattctgtcatttagaaatacttattcagggttacaagacaccagacatcatgctaaatgcttgggatactgcaaggaacaagacaacacagtcccttctttcaagaatcttgtactccactgttctgcatgcacatgcgtgcacacacacacacacacacacacaccccaaccatatgtgtcttaagaaactggaatgaattcaaactggaagtatacttcttaattaaacctaccagtttgtcaagatggaatccaaattctctgtacacaaattatgaagaggagtagaagacaaggctcaaatgaaattcagaatcatcatcttttatagaaattattaggaaggttttacctaattctgctaacaggttttccactattgaaagccaaagaaattaaaattaatgggaaaaataaaagaactcaagcaattgatcaaaatgtatttataataccttactttcttacatttgaaatgttcaaatcattttcagcttttgctgaatgtatgctcatttcctaatgttaatgtcttctttgcagtatataaattaagtccaaagttgcacagttaactataagaatgaattatacttaaactttcatataaactatgtagattggagtaagacaaaaatgaaacttccttttttcagtatttcctaaattatttcccaggaatcccaataagtgtaatccaatatgcagatccgttctccctccttgacactccttagtattaacattatttcacatgatagaaataattcatatggtgtcttcctttataactggaccccttttcaatgatttcactcacttgttacgtattcaccttatatccaatggatacaggatataaacgaatgtaatcacaagacactctctgccttaaagagcttacaaatagggtgtgaaagagtagagagtcagaagagggctgtcatgggagttaacattccatcttacataacagaaataatataaggggacagatacaagctaagtgccataaaggaggtccaaagttaccaggactcaaaggaagcagaaatgttatccaaatcgaggtattaaggaatacagaacaaagaaagtgacatttgaggttggccctgaaggataagcagaatttcaacaggtggagagtggtgcaggagaggtaccaagtgcacattcagagatctgttcaaattaaagtaatagaggtggatggcaagaaatccattagggcaaatggagtagtccatctgtctgtaggatacatgttaacaaatacagaggaagaacatgagaatatcctgtcaaagccaaagcaagtacaatattgaagataaaaaatgcatagtcaggaaaagtttaaatatgagtaagtatttgaagactcttactaaatagacttcacatgtgtatgccttacagttaatacccacagatctcccaatgtcaatagtccaagatacttgctaatgcagtatacaactctaaaacgatgaaaagtgcttatctaaggggtttaaaatttcaatcaatcaggaaacatatacgggttaaccaatggttatggacaccatgttatttatggatataaaatacacaatcctggttctcaagtcagcaaacataaagtcactaaactgaaaatacttttacatctcaagggatttttttctggtatatccaatgaccatcagtcatcctgtcttaccaatgtttaatataaacctctgtctgaatcttagccatcctcaatcagtttatatctacaatgcatacaatcacagaataaaactgttcactaacagtgagataattttttgcattcataaaacaactcaaattttattattataaaacagatcaaagggggttgcactaggttaaatctaagacttcttccaattaaaaaaatccttatgctgtgattctaattctactgaactaaatcctttaggaaggccagagaataggaataatttaagtggctacttaaattacaaagccagtagatatccaaatttcggcaaactactatagacaaaggagatggtcaaaaatgtttaataataatcctgactcaaatggacttccagactacaactgtacacttgcatagattcctgccacatgccttgcagtccctccggttcacctctcaggcaagagcagctacatgtgcagctggtaaaataaaaatcaggtatggcagcaaactggtgatattcaagaaaactacccagcagctcttggaaaaatctctctgattgctggcctgcctgctccaccaaacctagcatctatggatcatcactcaaatagtgaccttcatgtaagtatgcttgttatcaaccaccggtgcgttttcagtgctgcctcctggatcttggacaaagcccaacatcatacacactaacttctcctgttaacaattcactgacacccagatttcatctctgctgtgttctgttacatcaagaagctcacaattaatttacttcctatgaagacagagcaactcatctgaacctcatgagaaagaacaatagtgtgattagttcctcagaaggcatggaaaacacatatttgcttatgtgtctgatggttattatgccatctaatttttaagtattatgatgtttttatttcattaaccagaatgttacataatgtgccagagccacattatgtaatatttcattcatcagacaagtactaagtgtttcaatttttcctactcctctttgtctaaaatgaattcaatattattaatgaattacctgcataatttacctgtatcatcatttaactatagctattttaaattattataattaatttaaattatcataattatagcacaacttccttaaaagaagaatttactggaataatactcttgtagagatatacttcagtatggcatactgcagaattcaggaatttactgaatttttattcatttatcgttatgtcattcattcctggcaaactgtcacttttgtctacatacagttcattttttccaaactagaaatgtactcacccgatttaactgcttccatcaaacaaacaaacaaaaattgctacttagttttaagaacaagtcaataactttaaaatggcatgacagacaagtagcttgacctccagagtgtcttccaaccctaatatccatggttttacaatgataggctgcatgtatgctgtgtttccttcttaaaaaactttcctaagaaatcattaatagtgagacatttgtttttttaaaaaagaaataatttatttttaataggaacctatttgcatagatattcatttacccatgtcttaaacataggaaaatatcctcaaagatattcaagtttatacaagttttcctcttatagaccttttttgtccttgattccatagagagattctaataattctatgttgatagtggttgtataaaagggatataactgcaatgtcaaaaattcagcattatcaagttcttctgtaggaacaaaaaatgagcagaataccattgtgaaaatgtttatttactaaacaaccttgaaaaatcagaaacttttcaaggaactctcagagacagaaagaacaaacatacttttaacatactgatatttaaaaggagaattaaactcctgcttttcctgcttttattgaaaaaagccctagtaaatgtattattcaaccacacaaatagcaattttattcagaaggattctcatgaactaatccaattgaagacctggctttacagagtcaaatatgtcatgtttcttttaccctgttaacaattaggttttccagagaaaatcacatttttactcaccttttatgcaatatattactaagatctttaaaaaagagagaaaattagaaaactctccttgaataatcattaagctttacagccttttctttgggttttttgttttgtttttaaagcagtgactattctaattataatatttaaacatcacaagtttattcactgatatgtaatgacttttagtttccagagccaatacttgaatttgaattgcttttactgttacactaataaatataatccctagaaacaatacaggtaagcactggcttgtatctttcttacagcacatgatcctatcatgtatcagggttatggtgatcatcttattccttcaaacatgggaagaactgcttcaggagagtagctaggtatgatttaccctggtatctttcccagcacctagccccatggtttttaaagcatatgcccttcctaaatcctttttgaataaatggagctcaaatgttcacttatattagctatgtgtcagtatctcatatagatcaatccctatgttagggaggtaaaatttaatcttcaaaaagcacttgattctgattagccttttggttatgttgcctactcaatcaggaaattcctggtaaccgaattatcagaaatatcagttgttctataaaactggttaggttaagtataacaaaacaaggcaattaaaacaaagatgagtaaatttttaaagagaagaaagaactgctcatctcattacaaggcaagttctacaagtgcggagacttttccaggcttgttcattgctatatccccaccttctagaagagtctggcacatagtggaccctcagtaaatatttggtgaatgaacagactgctgacaaaacatgctataattttatctctattgtttttagttcaggctgttcaaacaggatccatttgtgcagtgcagaaactccaatacaggttcacagtgaagtcctattctggcaaaggttccaggatttgggattaccaaatgtaaaaaaagagtaaatttacttcccagacactcactggctgatcaggcgagggcctgggatacatcaaatgcaggtaagcaagaatttcaagtcattatccctgtgcatgcaggcagtaccagtgccagcaataacaagtcagcttttctggcaaatccatcaaaattaaatcttaaacttttgaaaaaactaatatgtttattatgctcctgttagcttagaggcttaactatctgtgggggagggcctataattatgatcaattacttatgacttgaaggtacttataaaagcatctgcccttttaagaaaccattaaagaaccaggcttaagactgtaaaactaatcccaggggcaatagtaaatcacaggtttggggacccaactttgacaactctcccttggaaagaaaagaattgctgtcaactgtccttatttcctgaccctgtctgagcaaatattcgcagcctctaaaatccagaattcttagtctggccaagcaagtcatggggaccaatggttgtttcaaggcagaggcagaagagaagaaacaggaaggaaacaaaaagggaatgaagatctgtagctcatgagggtgacatcatcaataatttcctcaagtatcactgaatttcatggctcgtgactgagagtcttttctgacatcttacaggctaattatcctcaaggatcttcttggttccagagcctgtaatgtctgggtttgaatatgatttgttctacaaaaaaggtcaggtgaattgacccctccctgtgaagctgctccatggcaagagaccatcaatctgctgaaacgcaaacaatcctttagatatctgaagtactttcaaatttacaaagtgctttcacatacgccatctcattttattctcacgactttaacaggtaggtgccatcatcaccttaacacgtaaaaataattttagaaaacaatgcctttgtcttcagttcataagaatatcctcctgaaattcacagtacagaatccaagtcatgggtcagttagaaacgtctagaaacacatcaatctcaggaggataaatcaagagaataggatggatcagacaaaatctacaagcacaatggcagaaagtgtgcctctggtataagaatggcgtaagctttgtaaacaatagtgttatacaggggtgcctctgtagtacctctacgtttggaaggacactattcattcatatacatgataagcacccttaactggatactccataggtaacagacaaaataaaacaagaacttccgtcttaaaattgtagtggtggaattcatccttcgggatgtattaggtgattcccctaggacgacagctgagttacagggggctaaatataccctccccttttccctccaatatcacaaagagccccaaaaacggattttgttgtttttaacaaataaaatacacatgaaaaaaagtcatctataggtttttatatataatctcatcttctaaaacactcattctccttcactagctaggccgaggtataatgcggtcttaactttataaccatttactgccttatttatatatttatgattctttgatgccttctagcttgagtctaaactgcgttgggaacaaagcaccgcacaaatcaccagcctgggataagaggagacaagttaaaacctcccaagaagattctgtagatatttggtctctctgagtctgtagagagtttggtatttcaaaggtcagtcttgggtctctccactttgatgactaatgttaaattgtttgactttttacaaaaatatttagctgtgcttatttacatcatttcatcctcagcgcacacagtaggcatgtatttgttgaacagaagccctaaatggatgagaaaaaagatatttctgctacacattttctcaagatcgagaaaggtaaaatcacaacccaatttgcagaagtttctaggcattccttttcaatgtaaagctatgcatctctgtttaaaaaagaaaaggatgacacaaccaaacaatgtcaaccacacaatggggaaattccaggatcactaagaaaacaccattatcctaagtcacacattttcatttaatactggttaccacacaggagagagtaagaactgctgtctccccacccactcgcacaatccatctgggaaaagcatgggcagaacatttatgatctaaccataccacatcttggactcacatttaaccctttggagaattagtctaaagagtatgtccgcccagagatataaagtaaaacagacacagggataacagttttggaagaaatttttatgacgctgtttgagattgggcatcagcactcaaactccttagaccaccaggagtcattcttactacgcaactttaataaagagaaactgagagtatgactggcaaaaatattatgatgtttctgcatcttgttaacctgatttacacttggctccacccataaagttcccactgattatcacacggcatcctcattctccagtctcacctactctgtctttcaaaaattccccaacggcatggccacgaaaaatatgcgggggctagcggggcatgtctcaggttggcttatcctgtccctaaaacgcacccacttcccccagaccctccttcagggtgggcagggagaaaacgcttctaagttgcacagctgcagggaagcctgctcaggtcatgtttttttgacttgtctttcggctcgctgtctggcaaggtcaccggctctggctcgcggctctgtcgacaaaacttaactctcactctgtaagaccaacaggtcgcgcaggacctccccagtcgccctctgccccgcacctttctgggcctgaggattcccggctcggccctccccgcgcgcgcgaggccccagatggcgagggcgcagctccctggctcacctgaccacgttggggtgctcgaaggtctccaggtgcctcagcaccgccacctcgcggatggtggagagcggcatgccctcctcgccggtctgcacccgcacgcgcttcaacgccacgaaacggcctccgttcttcaagtcgcgggccttgaacaccttcccataggcgccctccccgatctccgccacgcattcgtactgctggtcagcgcggcacaggccgtccttctccatgccgcctggacgccgcccgccgcggcgccgctggggcgggcggggggtgcgctcaactagctggcggccgccgctcgcctactccggggctccccggagatcggtctagctttacttgctccccgccggctcaggcgctcgggcgctggggctttcgccgctgcagaagctggatggagagacctccccgcggggctggcgtaaccctggtgccgccgccgcgaaactccgcctgcagagtcgccgccgccgccgccgccggaggagcgagccgatccctcctcttccctcctcgaagcgaagtcctcaacacagacacgattacatagcctctgcccaagcgcgtctcagtccagaatcattgcacctaaaggaggagacgggaggataagaagaaagtgcaatcagacagcccagaagccttcctcggggttcctccagactcccctcctcctcctttacgaagcctccatcgctaccctccgcgcgctcctgccctctcccaagccgcttaatccttcctggttcctccgagaaaagcgaagttacttttctttccctgcagggctgaagccgtcttcgcgcggagaggttgcaggggcccctcggggatgagcgagcggcgcgggacgcagtggaacgggagggggcgtgccgagcagcccagagtgtgccgggagcgcgggggaggggaggcgccgggcacgtcaatgtcacggcttaatatttatccctatatcattgtgttgcgccgctaccctccccgcctcctgaggcccggacgtgcagggagacggggtccaggggtgccggagggcgttcaggggtcgcgcacaagctggagcggaaggactgtgggtccatccgtgtggggccgcagaatgtgggtgggggctcccaggaccctgtaacccgatgctgggagtgtgcgagaaggggtggtcagacatctgctcagaaattgcttcctttctttctactttcagtttttctacgaggagacatttaaaaacgactcgcatacacaaatggtctttttggggtaaaggagtctcggttggaaacggaattctctctccggctgggaggacctccctggtggaaaccttgggaagaccagccatctggtcggggagggttggggcttatcgggggtgggcgagcgagcggtcctgggggaggggagacaccgtcccccacgggatcccaagggtgggagaaaggggtgttcgccacaatttcgcttgtcgtctccttaaagaataacttcaggaaggggatagcataatcgcgcctcgtccttaagttttaaactgatttcgacctgagcaaaactcaacctccctttcaaagggtggggggtggggggttaaatcctgcgcctccaggggtgagagagaaggtctctgtcctcggggcccggactcgcgaaccttttcccattcccaggacctccccgctgtaggtagcagaggtggctgccccattccccctccggctaaaggcccggtccagtctgcagccggacgcccccggagccctctgcacaacaaagcgccagagtagggtaccctaactttccctccccattcagcagctatctgggacctagggggcctccctcctccagggccgccgcggcctcggcaggactttcaccacgacggccgcatgtccggaattcccggggcacctcggaattacctgcctcgcaaccgctggcccgctcgccttttgccaggaattaaacaaacggcgcgacccccacgatgagcgggtggagcggaccgcggcgagagcagagcttctggcactcactacattcagaactttccttaaaagccgaggaaagagcccccagggactgcccgggggtctgagccaggtcgagggccacacaggtagccggggagccgccgccggccgcccaacccgcctgtcctgcatccccccaaccccctcccgctcgagtctagccccgggctccgcagcgaaggaagcgtcggggacgtcccacccccgcagggaactgcgcctgctgcccccgccgggccccgcactgccctggctctccccccactcgccccccagacggtcggcttcggcggagagaaacgggagcagcaatgccttttccccccctctcctccacttttttttgttgttgttgttgctttcccacgctggctgaatgtgacttgaccccatttcaaaaaaagtttgacatagtgcttcaacatttccgcattcctccgcgactacaaaggctgcagccgcctccttctgctttctgtctctgctctctgtcttcacactcaatgaaatccttcatgcgcctctcccgaagcctgccaagcaccacaagggtcgccaccagcacagcgacaagaggccacaccggggaccgcgactcccgcgtgtgcgcacacgcagatgcgcccatatgcacacggacgggcgcgctgcggggaccagggctgctcactgcggggcgtgtgtttaactccaatattttaaattataaaagtaaacttggaaactacagcaaacgtgcgtcttcgcggggctccaagcctgggcactggccggctgcgtgcacttttctgtgtataacacgcccgcaggaagcctgcgttaacatttatctcgtggaggggaaggtggagcccacacccacacctcagcgagctggagagggagttttcgagggggaaatgcaagcacattctccagcatggagtccctagaggcagtgcattttaaaccctaaatgtgaattattatgtgagtgtccgagtagagttccagttccgtttggagaaactgtatgaggcgtgttccgtgtgggtgtgtgtgcgtacggatacgtggaagcaggatctcggtgtcgcgggtgtccctaggctgggatctccccctctcatcagataaggagaatcctctagctccccaaaactggcccccataaccaatcccgtctcagttcgtaaggggttaaccaaagccgattccaaggaaacacaggtcccccccaccccccgccaccctccacttaccccacccacagttctgcctcggaccccggccaatcccccagatctcccccgggaccccccaccccgcagcccacccacccgagcgcacagctcctcacctgaggggcccagtcgcgtcgggcctcccgagggggctgcgagtgtcagtcggctctccgcacgtgtccgcggcctcgcggagcaggtaatcagactctggggaaggagttaccagcactctctccggcgagggggtgggcacagcggcggagggcggagggacggcggagggcgccgcccgcgccgctcgctgggggcggacgggggccgctgggctccggccggcgctgggggccccagccggggaggcagctggggcgaccgtgcggggtgggggcagggacccgcgaagccaactctgccggagacccaccccccggcggggctgggggctcgtggcgcagtggcaagaaagtgtgcaaattaaagccttccggagagaaatgaggcggccgagtcccggcagtgctccgagctccgggctccctagctcccttctacgagtcgggggctagaagggcgcggtgggggtgggggtgggggggagagttaaatgaaaatttccggctttcgctgaaactgtagtagggggatcctgcgactaaaataagcggcattagtgggagagagtgggacgtgtcgtcgggagtcggcggagtttccaaacccagggtcgcccagagttggggttttgacagggtgaagcggggggcatcctcactgtgtgacgtggacggatgggaaaaacacaaaacaaccaacaataattatgagcggccaatgggggtggtaaataccaatactttccaagaaactgaaaaatcagaccaaaaaataactcttctcttaaaaaaataaagaaaaagtttggcaggatgccttgcagaaaagaaaatactaatctatccaagcacttttcactttcagcatgagctacatttgttttgttttccttcgcttcctttctgcctcacaaagccctatcttttccttttagacagaggatatggtttggaaattgtcaggcactcttatggttaacgatctacttgaaggggctggcgggctcacaattattaagtggttagtaactgctgagggttcactaacgtatttcagaggagctaaaaagactaaaatttagtgtaaataatagaactgcagatagtagatacatacacaaaaagaggagtgctcagtttaaatgcattattggaaatctgaaatttgaaaccttgtaagaatgtatactttacctgctgagaaacccttgaatacaattatttcaggtgaaaattagattttggagaaaaaaaagtctttaaaactttctacaatggagtaaaagaaaacttgaaatagctgtctttttggaaagaatttggtgttctccccaaaatctctatctgtagaatacttgaaaccctttaaaacatcttaaagcaaaacttttcacaaaattatttacttaagtgctttgtagaaaaattaaaacctggcaaaattctgtttgaattggaaatactacttctataaatcttttgactttaaaaccatgttactaatctcacagtaaatcaaatttttgcctttataaaactgattctatgttatagtgtgaggtaaggctagggaaataaaaattgatgcattttcagtagcacatattttgcaatgcattataatacttttttctttaaaaataaaag

SEQ ID NO: 100 - DNA, 252385 bp, Homo sapiens
  source 1..252385: mol_type = genomic DNA
tccttgggaaggaaacttacagtcatggcagaagggggagcagactcatcttacatggtggcaggcaagagagactgtgtgacagcacgagaaaaactaccattataaaaccatcagatctcgtgagaattcactcattatcacgtgaacagcatgggggaaactactcccatcattcaattacttttctcccttgacatctgaggattacaattcaaaatgagatttggccgggcacagtggctcacgcctgcaatcccagcactttgggaggccgaggtgggtggatcacctgaggtcaggagttcaagaccagcctggccaacatggcaaaaccccatctgtagagaaaatacaaaaattagctgggtgtggtggcaggtgcctgtaatcctagctactttggaggctgaggcaggagaatctcttgaacctgggaggcggaggttgcagtgagcagagatcgcaccagtgcactccagcttaggcaacagcatgagactccatctcaaaaaaaagaaaaaagacaaaatgagatttggatagggacacaaagcctaaccatatcacaccccattggccacccacccacctcctcctcctagaagctcttccctccctgtgagttggcaggtgaacttctgttgttcctttctggccacatctcccacctcctttactcactctactctcttcctctggaaactaaacataggcatttcacaaggctctcctctcttccttaaaaaactcactcattttacaccttcaactctctccttcatacagatgattctgttttatcagctcacccctcacttcactcttgagtcccagactcaaatttccaactacctgctggaaatctgcacttcattggcccatggctgttttaaactccatctgctcaaaaccgaaagcaagacaaccccctgaaaacctacttcttctgcactttccactcttctgttccttcatgtgagaaaatatccacacgaagtacagcacatattctcgtctctgagtgtaccatcctccctgcacccctgcactcaactagaaatttccattctccttagctgttttctagtgcccatactactgattctgaactcaggggattatctgcaaacacaagttccaaggccccatctgcaggtttgaaaaccactgctcttgacacaacattttctaggtgaaatcagaccaagggaatgcttgtaccacatcagacagtcccctgttaaaactgttttcacggggctgtgatttgttgcgatacccttggctgcttaaaggctgctacaaaaaggcatatgattaaaattgctgttgtactcatgccagaggcgtagctgagcatgttaacattacatcacagagggggccttttatgaggcagggtccctgactgatgagcaaaccaccagaggagggtcaggcgagaggcccagtggagggtaacacacatggagttcagtgacccctttgttccttgaggagagaggacctatttctacctaaggacattcccggaaggcaatgggtttcaaacaatatcctgaagagactcatctcggggaactaagcaggtaggaatggaaaggaggaaatgggaggggagaggaagtcaatctgggaccctcatcccggcttcaaccaaaagcttcactctcatctgcctgatggatggagctacaatgtttttgaacaagagattccatttgaacaaagagctctgggttctgtaactttaagagtttgggtggtttttttttcttttcatttgtttgtttgttttttgccacatcagattttatagagaatttaagagttttaaaactacaattaggccgggtatggtggctcaggcctgtaatcccagcactttgggaggccaaggcgggctgaggtcaggagttcgagaccagcatggccaacatggtaaaaccccgtctctactaaaaaaaattacaaaaattagccaggtgtggtggtgcgcgcctgtaattccagttactctggaggctgaggaataagaatcgcttgaatcctggaggcagagcctgcagtgagtcgagatggcaccactgcactccagcctgggtgacagtgagacactgtcgtaaaataaataaaataaaactacaaatatagaggagcagagagtggcaaagcagattgaggacagacttcagaaggccttgaactctaatgtaaagcattcagattttcacctcaggccagtggggactcgccaaaagcttttgtggaaggaacagaatggtgaaagcaatgctgaacagagcctaacttggttacagtgttcaggatggagaccagagttggaagataaaacagaggcaccaactaccaggtgttttctacaataagggcctcaatcaggtttttttaaggaaaagatgcattccatgaagtcaaatatccaagaagaggtatacattgcacacaatactttatttgatccttttctacattccccaggggtgtattcctgtcaccattggagatgaggaaataaggccctgaggctcaagtcatttgtccaagattacatagtgagcaaatgactaaactgtaattcaatgccaagtctgttttttgttttttatttgagacagagtctcgctctgtcaccaggctggagtgcagtggcgtacagtcttggcccactgcaaactctgtctcctgggttcaagcgattctcctgcctcagcctcctgagtagctgggactacaggcatgtgacaccacactaattttttgtatttttaatagagactgggtttcaccacgttggccaggatggtcttgatctcttgacctcgtgatctgccctcctcggcctcccaaagtgctgggattacaggcgtgagccacagcccccggctgtctgttaaactgtttactgtattgtatgacctccagccatccaaatcccttacctgggcattcaagaccttaaaaaatcagacttctaaaatgtgtgcattttatcatatgcggatagtacctaatttaaaagttaagctgatcctcaaaacacttgttattttctgatttttttatagttgccatcctagtgggtgtgagataatatcttattaggaaacctcatttgtttttaacttttttgttaattaatgtatttaagactataaatttgcctttaagtactgctttagatgtgtacaaattcaatcatgtagtattttattcagttctattttttttagtccaaatgttatttaatagtgtgctatttagtttctgaataagcaggactttattttagccatcttttaaaaaatattaattctgtgatggcattgtagttggaaaacattgtcagaatgggattgattccttggaacttactgaaacttcctttatggcctaatatgtgatctattattgcagatgttttaggtataatcaaaagaatgttttctgtttgtgttgtgtacacacacacacacacacacacacacacacacatatatatatatatatttgagacagaatcttgctctgtcacccaggcatgatcttgacttactgcaacctccacctccagggttcaagcaattctcatgcctcagcctcccaagtacctgggactacaggtccgtgccaccatgcctaatttttgtatttttagtaaagatgggttttcaccatgttgtccaggctgatctcaaactcctggtctcaagtgatctgcccaccttgtcctcccaaagtactgggattacagttatgagccaccacacctggccatatatttttaattgtatttttgcccattcatatcaatgaataaacatttccaaatgcaactgttaatttttgaattttttctatgtatctgatatagctcaagattgtattggtaggtgttatatgtttatgatgattattttgattttatactgttccttaaacatttttaaacagtgaaatataacttacatgaataaagtttataaatcttatatgcatatttaaagcaatacttacagacatccatataaccaccactaaggtcaagaaataggctgggcacagtggctcacacctgtaatcccagcactttgggaggccaagatgggtggatcacctgaggtcaggagttcaagaccagcccggccaacatggcaaaatcccatctctattaaaaatacaaaaattggcatgtgcctgtactctcagctgcttgggaggctgagacaggaagaatcgcttgaacccaggaggcagaggttgcagtgagccaagatcatgtcactgcactccagcctgggtgacagagtgggaccctgtcttaaaaaaaataaaataaaataaaataaaatattgttaacttttttttagttaacagttttaaaaataaactcacctttctaaccttttctggcactaatccaccttctccaccaacccttccatacacctcatgcttcttagggataaggctgtttgtcactatgcactaattctgctattcattgcacccagtcattttgcttgtttgagacagggtctcactttattgcccaggctggagtgcagtggccccgtcttggctcactgcaacctccgcctcctgagttcaagcaattctcctgcctcagcctgccaagtagctggaattaaaggcactcaccaccccatgcccggctaatttttgtatttttagtagagacgggatttcatcatgttggtcaagctggtcttgaacttctgaccttgtgatccgcctgcctcggcttcccaaagtgctgggattacaggcgtgagccattgcacccagccgcccccagtcatttttatggcttctcttacacctagtgatgactgtcatgtgagggtcccttcccccacctcccctgccaaaaacctccccaggcttcaaactgcagctaagtggtacctctgtagagtgtccttcactctctcctcaagagggaacctctgtctctctattctctatatctttacacctttttaaaaaattacccttaagtcagctttcatattcttctcatattgtggttattttgtcacctattacatataaactccttgaagacaggacaaaggtcttaacctctgattttccttagcttgattcggtgtgaggcatatggtaagtgctcaaccaatattttaaagaaatgaatagaatctcttctttaattcagctatgtttcattattcaagatagctagcattttttccccttaaaacatctctttggccaggcacggtggctcatgcctgtaatctcagcactttgggaggccgaggcgggcagattgtctgtgttcaggagttcaagaccagcctggccaaaatagtgaaaccctgtctctgctaaaaatacaaaagattagctgggcgtggtggcatgcacctgtaatcccagctactcaggagtccgaggcaggagaatcacttgaacctgggaggtggaggttgcagtgagctgagatcatgccattgcactctagcttgggcaacaagagtgaaattccatctcaaaaaacaaaacaaaacaaatctctttatgttcatttcttttccattttgattgctgctctgcagaaagagaaagaggaaggatcgaaagaagaataaaaggaaagaaaggaggaagggagggagaaagggagggagggaaggagggagggagggagggaaggaaggaaggaaggaaggaaactacatttagatcccctttccagaccaattacatgagaatttctggagaatgagtccagcatccttaattttctcatgtgccaccaggattgagaaccactgcttttttggtcccttttaatttcaccagttttatctctaaacctctaaaacagggagggagggagggaggaacccagtggcttttagggcctcgtttcacaggcccatccaatctattcagctacttcttccaacagatgcctctgctccaaggctcatccaggtcccacaggcacgctgtgctcccgtctttattctctgctccttgtacctggatgtttcccttctcccctcccctactcacattctaaccatccttccaagctattccctcctcctcaaagcttcccagaccactactatcatccctttctaaatccctgtggttgaaataagcatgctgaccgtagctaataacactgtattgaatgctggaaattggcaaagagtgtagatttcaggtgttctcaccacacacacacacacacacacacacacacaaaggtaactgtcaggagatggatatgttaatttgcttgactgtagtattcatttcactatggatatgtactgcaaaatgccatgctgcacacttcaaatatatactgtaaaagaaataagaccttcgagtcggcacaaaatccaacacaatggacttatccccaccaccagtccatgcacttgtctctctaagatcacaaataccctgagaacagggaccatggctaagattctgtggccatgaccctggcctctaacgctgtggagacatggtttgctaatggaatgctttttccagaggaggccctttaacctaaccctctcctgccacagagtaaaggaagaaacaagaagtttcagtgacttacgggaagtcgtacaccttgacccgaatctagcaacctcaaggctcttctctggttgtttattcacagccatctgttttcctcattctctcctctgattccccctcaggagcgacagaaggccctttaccctcacctttctctcttagtcttatgaactgtgtctttctcagtgataggtcactcagctgctgtatttggtggcagagcccagagaacagcacagaaccacagccctcagggcaattcagatgctggggtttttttctgaaagtccttccctgaagagttattccttgtgagggaggggggaggaggacatttctggacttattgctgacatacacaccaaaggctgagtttgtcttctgggttaaacagaggcactatggctctaaattggccaggaagaggcttcagctgaggctacaggagggcagaccaccaagcgagtataaaagaaaaaagcaggctgggcacagtggctcatgcctgtaatcccaacattttggaaggctggggtgggcagatcacttgaggcccggagtttgaaaccaggctggccagcatggcaagacccagtctctacaaaaaatacaaaaattagcgcggtgtggtggtatgcacctgtagatccaggaatttgggaggctgaggtgggaggatcgcttgagcccagaaggtcgaggctgcagtgagccataaccacgccactgcactccagcccaggtgacagagcaagaccgtctcaaagaaacaaaaatgaaagaaaaagaaaaaatatataacagttaagtagaagcagaagcttccaccaatttgagggaaaagcaacctttataaaccaatgtcaagccaggacaggcagaaaagagcacctcttgagtagacaggctgacaggggccctggaattcaggctaggagcacatgttcatgagagaattagaatactgcactccagcaataatcccaaatccttggcagatgttaaagtgatttccatccccatgaggtgcagagatactaggaatcccccctggatttcttcctgggcaaggctgttgccaaggtccccaactgaaggtagaaagggtgacagtggccagcggagtgagaaagacagcaggggctgggcccacacaggtggccgccgttcccaccggcagcagttaaggctttgattagcagcccacagcagccatggctggggagggccacctcccacccgggcacaagccgaaggacacttgtgacaggacagctgcggatggtgggtactctcatgccctgtgtctttccacactgggatattcactatcacgtatacccccattcacacctggaaccactctgctagtccccaagaggagattcggactgttagaacgagataatttcagagctttaaatggctcccatttatgagaaactggatgagagagcaaagcaaagcattcacgactcacgtgctacagatgttcaagccaggagaactagcaggaaggggttctttccagccttcactctgccatttaccaagtatgtaccaagtatgtgagcctgggcactgtggatgtggctcaccattcctgcatctggggtgggcagatcacttgaggccaggcgtttgagaccaggcttgccaacacggcaagaccccgtctctacaaaacatacaaaaattagcgaggtgtggtggtatgcacctgtagatccaggaacttgggaggctgaggtgggaggatcgcttgagcccagaaggtcgaggctgcagtgagccgtgaccacatgagggggtcgagcaaaatgactctttgaaaatggccctgacaattctctagttacaaaccctcatttcacaatcattaagtgagggctccaatcacacagccagttgggtcagagcagagctggaatctgcctccctggatctcgtgcttctctgctctacccggcatctccttcctcccacctgtgattcccagtcatgctgtcaataggagtggcgggaggaggatcctggagccataagctagaaaggtccccaagacgcaggccgcaggctacgtgggaaatttccagatgctaagagaaggccgctctgctctttgtcagggctccccgtgaaactgacgaaaagtcaaattccatggaggtgactaaagacaactcgactctatctgtattatttgaatttcatacaatcaagcaggtatttcagtatgacttaattaaaaactgaatacagagtcttaaaacttctatcatttagattctttttttttttttttggagacagaatcttgctgcgttgcccaggctggagtgcagtggcacaatctcagctcactgcagcctctgcctcctgggttcaagaagttctcctgtctcagccccccaagtagctgggattacaggcatgggccaccacacccagctaatttttgtatttttagtagaaatgaagtttcaccattttggccaggccggtctcaaactccagatctccagtgatctgcctgcctcggcctcccaaagtgctgagattacaggtgtgagtcaccacacctggcctagattcatttattttggcttaactaatatctaataggtaaatcacagatatcccactggaggaacattctcacataactccttgtggataataatcacagctaacattgagaggatgccgtgtgccaggagttttgtagatgtgatatcatctcatgcttacgggacgtgtggctgttaccagcaccttacagatgcgaacacagagggttggagagttaggtcatttattcatccacacaggggaggtttggggccaggatcaaacccacgtgtgttggatagactgactccacagtccatgtccccgatccctgcaccacactgcctctcggtgggtatttacacctgacactaatatgtctctctaacgccattactgaagtcaagttctgacagagtaaggaagataagagacaacatcagagcacctgggctcaaggcccagctccaccacttattacttaggagaagttaacctttatgaactgcagtgtctcatccaaacaagaatgattctagatgattgctcacagaactgttgtgaagactaagtctgagaacccatgaacaatgctcagtgcaatgcctggtatataataagctctcaacagaaacacataatcatggttcaggacaccaaagagcacctgggcccccatcacagcactgctgctggccagccctggattgaagcaccatgctcccaggctgccagcttctgcagatttcagctaccctgaacattccctgccttaaagtcagcttccagaagagcacatttgatcccaagttaaattgtgaagtagacgaccagctgccattcatatggagcccagtgtggatgcgtaggtaagttagaggatgaagcgctgccttcagggtcacaccaacaaacttgaggactgactactacagaatccgtgagtgttctggctggtttagaggcctcggttatcccagttgtctgtattgacaagcagcaatcttgatgcgccacctgagtgagggttccactcagctgtaaatgacatgttataatagttttaaatttatatgtgactttttcacttttgtgtcttaaaagccaaaggaaatgacctcagttgttttttatttttccaaaacaaagtccaaaaggtatagactttccagcaccatctccaatggcatgtttccataaaccctctgcataggcacgcccaaccactcgccactctgaaaatgcatcgtgctttctcgtgcctctgtgccttgggctctcaccctccctacctgagaatgactcacttccttgtctccattaaagcatttggttacttcttcctgctttcagaccttttgtataagacgtcagttatgtcttcctaccagactgtagaccacatgaggacaagacgcgcctccttgtcatctgtgtccaccagtctactagaaaagctgaaaaaaggaaaggggatggtccttaagctgtaatgcagacacattttcatgactgcaaatgatagccttccaacctcatgataagtatcaggccacttggcttacttactcttccatgtattgtaatacgtcattataaattgcaggtaaccaacatattgacatatattgtggtgaagaagagcaagtttgactactttaaacattgctttttattccttatcattttaaatgtgttgctacttttgatgcactgcttactgacatttattgcttcctctgcacaagcacaaaatgctggctcactctcagattcaatgtagaactggtgaaagtcattaaatgccatgagccttgggttttttcccatgtactgtagtaaattcctcttgttgggattgtaattgcaggtggtcatcagagaacacagagcccccggaagaattttatgacatttcaggcaagccacaggtcagcctggggaaaaagcaggaagaaaaactggcaatacgagggcccaacccaaaagttattcctgaagagaaacaacggtaagaacttgcaggaatcaaattagttctgatgcagtaggcagaattcttagagaggccccttttatttaaaaatgattttactggccgggcacggtggctcacgcctataatcccagcactttgggaggccgaggcgggcggatcatgaggtcaggagatcgagaccatcctggttaacacggtgaaaccccgtctctactaaaaatacaaaaaaattagcctggcgtggtgtgggtgcctgtagtcccagctactcgggaggctgaggcaggagaatggcgtgaacccgggaggcggagcttgcagtgagcccgagatcgcgccactgtactccagcctgggtgacagcaagactccatctcaaaaaaaaaaaaaaagactttaccaatatgtagtcagaaattgttcaacataagctttctggtattccagtcataatactctagctgttcggacaacgccttctctctcgcaagctctcctcttttttcattctctttaaatctcctatctggcttccctaaataaattttttgtagccagaacttccatttcattgcagtggttagttttgtgtctcccattgctctttagtaacttttaatgacctgagacatcgttggcttcctttccttttccacttcctccaagtcaattgatagcacaccctacactctgtgtttacaagcgtcagagaaggcagcaataattttttttttttttttttttgcctcatcttcactaagggatgcctgaattcttgacagggccagatagaatgcaaaagtggttttctacattgctaagaaataacaggcaagtctagataccacgagagctagcaacctgaagaagtcatctgttcattctttcatttatttaccgtatacggtgttgggtgcacaaaaagcatggagcaaggtgcttcagggtgtttagcaatgagcaagacaaagacactgacaaggagctttcattctgcaagccgaaaaagacaggagctcaaattgataccatacaagtagcatgaaataggcaccccagagagggacacagctatggaaaaatcaaatgagggaaagattacatctcattgggaaagacttggtggaggttcaggtcagttctgggaatgatgagtctgaagtcattggggcattcaagggaagcatgagcaggcagtgggaacctgggaccacaatcaggaagaaaagggtgggtaggatataaggggtccaaagtcacttggaagaggttgtcgtggctggagcagtgaggggctcacacctgagactccagtactttaaagaggctgaggcaggaggatcacttcagccaaggagtttgagaaagaggttatcctcaattccctaattcctgttccgcctactgggatgcttccactcctacagcttccagagcctggtgcagctggggcttttaacttaccaacagatgttctgctgcagctggctcatccaggatccaccataagggacttccgcttaggcaaaattgcatttcagtttttaaaacaaaagagggtcaggcacggtggctaaaggcctttgggaggctgaggtgaggggatctcttgaggccaggagttcagcaacagcctggccaacaatgtgaggctccatctctaaaaaaaaaattaaaaattagctggacacagtggcatgtgcctgtagtcccagacactcaggaggctgaagtgggaggcagaagcatcacttgagcccaggagtttgcggctacagtgagctatgatcaggtcattgcactgaagcttaggcaacagaacaaagaccctcacaaaaaaaaaaaaaaaaaaaaaaaaaaaaaaaaaaaaattaaaaattgaaagggatttttgttgttttgttaggtttttttggtttttgttgttttcttattttttacattgtcttcacagacatcaccctgttagatttttttttttctttttccttttttgagacagggtctcactctatcacataggctgaagtgcagtggctcaggacggctcacaagagcctcaaccccctgggctcaagggatcctcctccctcaacctcccagatagctgcgattgtaggcacatgccaccacacccggctgattttatattttgtagagatggtgtctcactatactgcccaggctggtctcctggcctcaagcaatcctcctgcctcagcctcccaaagtgctgggattataggtgtgagccactagaccaggtcccagacattctttttgaatatacctaagacatttgcaataacagattatgtattatgccatagaccaggaaataatttattatttcattttttctcatttttaagaatgcccagttttttgtcattggtggtggtggtggtggtttttttctgtttttcgtttgtttggttgttttttgttgcccaagctggaatgcagtggcacgatctcagctcactgcaacctctgcctcctgggttcaaatgattctcccacctcagcctcccaagtagctgggattacagcgtgtgccatgacgcccagctgatttttgtattataagtagacacagggtttcaccatgttggccaagttggtctcgaacttctgatctcaagtgattcactcacctcaaccttccaaagtgctgggattacaggtgtgaaccaccatgctcggcccccatggtttccttaatctgaaaagtataaaaaaggttttttttaatccagattcccactagccagaagtaatatcatttatagtaccaaacttttctatttgattaatgcaattaaggcaaattaatatttgtgtgttgattcttttatttgcatttttttaaaaaacaaaacttggatgttgtaattttgttattttctttttcactcgattatgtatcatggccttttttgacatatgcatctacattatcattttagattcctgcaggatattccagtttattgataggcattcaggttatattgatagacattcaggttatttccactggtttttttttttctttttttctttcttttcagacagagttttgctcttgttgcccaggctggagtgcaatgtaacaatctcggctcactgcaacctccacctcctgggttcaaacgattctcctgcctcagccttcccagttgctaggcctacaggcatgcaccaccacacctggctaattttttgtatttttagtagagatggagttttgccatgttggccaggctggtctcgaactcctgacctcaggtaatccacccgccttggcctctcaaagtgctgtaagccaccacacctggctgtttatttccacttttaaattgcttttagataatactgtgataataaacatcttcatatgtatactcttgtgcatgtatctgggtgtctctccttactatccatttatagaagtaggattactaggtcgaaagatgtggttaacggtattaatacacattgtccttaaatttaacatcacgtcatctaaactgtggcctcaccttccctcccctctaagtacttcccactcatcatgtggtacctctttcccagctctacacctatcttgacccccattcctgcaaggcctaagctgcctactagctgcctattagctaatcaacagaatattcactttttagagcttttaaaattattactcattttcatgaagattaaaatgacttccagagccaaggaatgaagctataatgaagacaacaaagacaggagaacgatgatgggggttgatccttggctgatagacttcaaagtcaaccattagcacccaggatgagtcattttgaattagaatcagatactctgcccacctataatgagagatcttcttgatctttaatgagtaccatctcttcattgaaacagtcaccagaatttgcatttccaagatctcttgccactttccccaaaataccttctatggccattacacagaaaaaaacttatctgtgcctgcaaagaaaactcagctttggaccaaattatccccactgtgtacaacaaaatcacattcctctggcctctgtatttctctccgtagtccatttcaacgcttatagcaaatcaacattgtgacccaataattattaagtccattaatctttactgcattattaatcgcaaatctcaccaactaaccttgcaaagtgcatatgtgggtaagccatggaagctagaaagagtttcctgggaaaatctgggatcttatttcatgtcctcacatttctctgaaggaaaaaaacttgtaaacattgagtcaaaaccttacaaattttggagggaggaggagtgcaaaaaattcttacaaatttcacaaggttacaaagcaaaaggggaatgtggtcttgaaaaattcttaaaacttaaccagaatgaatgacgactgatctttctttccaatagtttgatgtttggattagtgcatttccgttgtgaaatccgattttctattatccagttacacctagtaggcatgaaataaatgtttgttgaaatgaattaaatgtaatatgctcaggtcaatgtctttcacattctttataaggtcttatatttggaaaataatattaacaaccatttccatgaataacatttacttcatccatagaaaatgtaaagatactaccaaagggagccatcctaagatgcctgaaatgagttattaaattctaacttaaccacaaccaatattactaatttgttttaaataacttgtccaactcctagaaggaaacaaggatttggggagcagaagtagatcaagaaaattagtattaaatggcaggagtaaagggataacatttgaaattctggcttcctggagtgatcagtcaaaagctctcctgctggaaaataatatcttgaattgaaaagcattcggatcatggtcgatttttaacccaattaaatttccttctcctaggtagcctatttactaaagcagtatgatagctgttaatattatcatttaataaacatattgctagtaaaaatgaactctattccaactattaccacagcataaataaagattttttctcaaaatgttagcttggtttgggattgctgctttttctttccaattgatttgcctctgcccagctgatctgcctctgaggagctaaaaaataccaataaatagtaacacagactattaaagtatgcttttcataatatgtcaatatctttctatttctcaggataaccatatgcaggaaggatagggaaacaataaactattattttaactgcctaacagcgttttttcaactagaaaccacattcaaacaaccttatttttcactatgcagcacgtagtccttctcttatttcctttttcttaaaaaaattgaatgtattttgctaatcttctctgtatctttccaattttaccctgtgtgctgccgaagagagcacttttctgggggaggggaggggaggggtgttgtttttctatttttgtttttaagacagagtcttgcactgtcacccaggctggagtgcagcggcatgatctcagctcattgcaacctccgactcccaggagtcaagcaattctcatgcctcagcctccctagtagctgggattacaggtgtgtgccaccacgcttggataatttttgtatttttagcagagatggttttgccctgttggccaggctgctatccactcctggcctcaactgacccacccacctcagcctccaaaagtgctgggactacaggcatgagccaccatgcctggcccagaacttcctaagaaacacttacacgtcactgcttgctgtctcacacttccttgggtgaattccctggagagtgaaaagattcaaacagacacaaaatggcaatacatgctctgtccacttcacaggaatttacctgaatagtttcagacacagactttatcataattaagaatttttgttttttggggtttttttttttagatggagtcttgctctgtcgcccaggctgaaatgcagtagcgtgatttcggctcactgcaagctccacctcccgggttcacaccattctcctgcctcagcctcctgactagctgggattataggcatgtgcctggctaatttttgtatttttagtagagacgggatttcatcatgttggtcaggctggtctcaaactcctgaccttttgatccgcatgcctcagcctcccaaagtgttgggattacaggcatgagccactgcgcccggccagagaaatattttttaataaacaacttcagaggccaggcacagtagcttatacctttaatcccagtactttgggaggccaatggggggaggaacacttgaggccagttcaaccagcctgggcaacacagcaggaccccatctcaacaaaaaaattaagcactttgggaggccaaggtgggaggatggcttaaggtaaagagttcgagaccagcctcagctacttggcaagaacctgtctcaagaaaacaaagaaaaaatttaaaaaaacacaaaaactaattaaattatgattatagaaatcttccgaaagataagaaaatgttcgtcaaataccaagtaaagatttttaaaaagagtacgtgccacagtgaccaactcatcctggttaatctagaactgctacagttttaaaactaaaactgttttaaagtccacagttcatgccaggcacagtggctcatgcctgtaatcccagcactttgggaggccatggcaggtagatggcttgaggccaggagtttgagaccagcctgaccaacgtggtgaaactccatctctactaaaaatacaaaaattagctggatgtgcaggtgcatacctgtaatcccagctactcgggaggctgaggcatgacaattgcttgaacccagggggcagaggttgcaatgagccaagatcgtgccaccgtactccagcctgggtgataagagtgagacattgtctcaaaaaataaaataaagcccacagtcctgggaacaccccacagaccaaactgaggcaactgattaccctagcataagcaatctttgaatgaaaatatcaaaatcatcaagaccactccctttaactgaattaaacagcctttattgaatgccttctgtgtataaagtacaggcagcccttcatacccacaggttccatatccatggatacaaccaaccatggatctaaaatatttgggggtaaaactgcagtaaaagtaatacaacaatataaataatacaaatttaaaacccatgtagtataactatttacatagcatttacatggcagtagatattaagaaatttagcgatgatttagagtacacaggaggatgaagttttatacgcattgactatgccattatatcagggacttgagcatctgtggattttggtattcctagggtcctagaaccaatccccaacagataccaaggatgactgcactgtgctgagcaggaatcagtcagggtccaggcaggagacggacagtacagccaaactgggcgatctgacgacagtgtcacaaagaggctatttacagaggtgtgggcatagttagagaaaacaatgaacagagaagcatcctgggctagcaagagtgggggctgccagcacctgaaaaggcagaggaggctgtccaacctgaactcaccacgacccagcaggaggcggcaagccctcccctcctccaccctacagactagcactgtgcctcccactgggtaaatctgactacaaggcagaggaagggggcttgttgatggagtcctcgcctgtcagcaccccaagccacagagcagggcagagtgagtctgaaggcacacaaacaacacataagcctggcccctgctcttggcaacttaaaaatctaagggaaacatcaagtcgttattttaggcacatactgagacaactcactagtgccaaaaactgagtgtttaggtctaaccggtccctgcagaattaaatcaaaatcaagttattcattccttatggctcctgatctgctttcggttagaatgaatgagccctggggattaaaagagagatttatgtatccgtgaaattattttactcatcccacatacctgtgctagtttgagtcctgcatctgtcccctcactttttgtgcgcgtttgagagagtcttgctctgacacccaggctctggagtgcaggggcatgatcttggctcactataaccttgacctcctgggttcaaatgattctcctgcctcagcttccgaagtagctgggaccacaggcatgtgccatcacacccagctaatttttgtattttttttttttaagtagagacagggtttcattatatgttggcccggctggtctcaaactcctgacttcatataatccacccaccttggcctcccaacgtgatgggattatagacgtgagccaccatgccgagcctgtcccctctttataattccaaaggtgagggtgtctttcgtgtaacatgtcagggcttaccttgatgggtttatgctgcagtactgtgccaaatgtctataccctgaagcaacctgctcgcgtccggaatcggtgggttcttggtctcactgacttcaaatgtgatgccgcagaccctcgctctgagtgtcacagttcttaaaggcagcgtgtccggagtttgttccttctgctgctcggatgtgtttggagtttcttccttctgatgggttcgtggtcttgctggcttcaaaagtgaagctgcagaccttcgcagtgagtgttacagctcttaatgcagcgcgtctggaattcttcgttcctctcgttgggttcgtggtctcactggcttcaggagtgaagctgcaaaccttcgggtgagtgctacaactcacaaaagcagtgtggactcaaagaattagcagcaacaatatttattgcaaagagcaaaaaaataaagcttccaaaccgtggaaaaagaccacagcagattaccgctgctggctcgggcagcctgcttttattctcttacctggccccacccacatcctgctgattggtccattttacagagagccaattggtctgttttacagagagctgattggtccgttttgacagggtactgattggtgcctttacaatccctgagctggacacaaaagttctccacatccccgctagattagctagacacagagtgtcgattgctgcattcacaaaccctgagctagacacagggtttgtgtctagctgattggtgtgtttacaaaccttgagctagatacagagtgctgattggtgtatttacaatcccttagctagacataaaggttctccaagtccccaccagaatcaggagcccagctggctttacacagtggatcccgcaccgagggtgcaggtggagctgcctgccagtcctgcgcctgtgcgcccacactcctcagcccttgggtggccgatgggactgggcgccgtggagcagggggcggcgctcgtgggggaggctccggcggcgtaggagcccacagcgaggtggggaggctcaggcatggcgggctgcaggtcccgagccctgccccgctgggaggcctggggaggcagctaaggcccggcgagaagtcgagcacagcagctgctggcccaggtgctaggcctctcactgcccggggcttgctggtggacctgcacctccggggcttgcgggcggacctgcccgccgagcccacgcccacccggaactcgcactggcctgcaagcaccgcgcacagccccggttccgcccgcgcctctccctccacaccttcccgcaagctgagggaagcagctccagccttggccagcccagaaaggggctcccacagtgcagcggcgggctgaggggctcaagcgtggccagagtgggcgccaaggccgaggaggcgccgagagcgagcgagggctgtgaacaaactccggacacgctgtcacctctcactcttatcaaaggtgagcatctctgtgcttttccaaaatgtgtccatttttgtcaaagccaaaaacaaaagagcaaattaccaagcagcgtttcactgcatttatctgttgtctacaactcctgacttgctaagggcgactgaaatttacaggaggaacatcacaggaaatcatcacgaatgtcagctccaaaatggtccccatgtcttattctttccatcaccattaatccaagatttagaggttaaaattctaataaatgggcccggcacggtggctcatgtctgtaatcccagcactttggcgtacacaggcagataacttgaattcaggagttcaagaccagcctgggcaacatttgtctctacaagaaatacaaaaaaattaggccggcgtggcggctctcgcgcataatcccagcactttgggaggccgaggtgggcggatcacaaggtcaggagttccagaccagcctgaccaacatggtgaaaccctgtctgtactaaaaatacaaaaattagccaggcgtggtacgcacctgtaatcccagctactcaggaggctgaggcaggagaattgcttgaacctgggaggcagacgttgcagtaagccaagatcgcaccattgcactccagcctaggggacagggcgagactctgtctcaaaaaaaaaaaaaaaaaaaattagctggatatgctggcacacacctgtggtcccacctatttgggaggctgaggcgagaggattgcttgagcccacagtggttgcagtgagctgagatggcatcactgccttctagtccagcctgggtgagagagtgagacctgtctcaaaaaaaaaaaaaagtcgaataaatgtatcataaaattagatttcattctgttagcattaaactgcagaaattcctcacacaatgatatcatcatggcagctaatgtctcatgaaaagacaagtctccatgtgaagggtgcttatgatttttggaaaacaagttagtctgagactccattcttctctttgtaaaatgtgggaaataatgggtgactcattgattgttgtaaggattaaataatataatttccaaaaatacctaacactaagtaggctctaaaattagtctccccaccctcaaactctctaccttaccctaagtgcatatatacatttaaatacatagttttagtcactttgtttaacaatgttacattttagtaatttaaaaaatatattttccccaaaaccagaaactccaaatgtatctccacttccctgacacaaagtagctatctgccaacacaaggaatggggtgaaaggaataggacattccattgaaccaggagtttccagagaagtgtgggtttcttcctttcaacctctttgatgtaatctaaatcaataagtaatgacagtttgtccaaaagtgtcatacattcaggtgaggaagaagggtaggaagctcatggatgtatgcagaggaacttaagaactcctctcaaacactgtaaaacaggttttctgtccatacatagggtggatttgcaacacagccttccacaggctcaagcccatctgttgtaaggagcatgagttaggacagaacaaggaggaaaactaccaagtcatctctcttcacacaagtccagccaagtattgattgtttattcaaagctttcttttctccctccctctctctgttcagtcactatcccctgcctcccacccaccccctccctccaccaaatgaaattaaatttctcaactacctctatttgatgctgtgtttagcataagccctgagtagatatggattctgtttcttgaattttccctgacaaaccgcttccagctgccctttggggtgggatgccaccgtgataaaatacagtgtcatgtttgctgaggatttcagctgccacctgggggctcatgcactcaatgagtgctctttagcaaggctggtggtgacatggtgacaaacggtatgttgacttttttctttctgtggtttaggactggttggtttcagtcttgctggctctttctcctgggttaccaacattttccacatttagagcctgtgactgcctctcctccaggattattgcagcaagctccttgctgtcgacagaagccatttgttggttagagggtttacaactgagacgacctacaagtgcccatttgatagttaacccatgcttcagaatttgcttattttttttcctttttaaggactctttcttcaactaaacagtttctcttcagagtgttatcactccgctcccatgaaatgactgggactgttacttcttttatctctggtcacacccagcaaaattaagcttgcttgtggatgattagccgtaggctgatccacatctgagccaattgactggctgcttaggaggactttgcctcgggctcacccctgaagccaccacccctgaggccactgcctgtgccagggcattcccaagcctctatccccagtgtgggcttccctgctgcatgtggctcttcagcctcaggttcctcctcttcactcccccatccttgcatgggcttcctcttccgtcccgcttgcttctagaacatttccaattattgcttccaggtcctgaacactagtggctgaactgaaaaatggaaaagatgatgaaagccaggcactgagaaatcagttaattaaactcttcagaggtccccagaaaggacagattcccctgcacacctgatgaggaatcttggactcttgcttattaaagggaaaggaagtccattttactggacacttgtcgaggaattccagcaagcccctggacagagggcttcagtgaccagggtagctttctgcttttggttgtaaagagatcagaaagtgtcatccttcaaagcgatgtcatgggctcagagccctttctgtgcactttgccatattgtgcccactccggttctcaaggtcagttggccatctgaagtggaacaatgacttctctacaatccagctttaactatttgcacagttccatgccattccactaatttagtacataccagggtgtacccaggcttcaggctggtctgggttctacttcccaagcccagtcccagcacatgccttcccaaagatctttcctcccaggtcccagtctccctcttaggatcaaaccaattcaacttaacccttatttaatgtcttctctctgcctactcagcccagtgtggtagtcaggcacagaaactcatcaattacagcacagagtcagcaggtcaacaacagagtgggataaaattccctcttctccaaacacacaaacccagctctgtagcatcttttttccacccctgaaattcccccaaacagactatcccttgtgctggcatccggcaaggtcctaaagaggccctacagcctgtttttgctcaggctgttttcaagcctttttccgatctattttctctgaaactttgcgtgcatatacacacaccagaatcaacaagtcgactgagcatgcaaaagccacatccacatttctagaccttgataccttctcagacctctggcaaatctaaagcccagaccaactgggattactcccaggttatacattgctttagagaagagaatatttgtcacacctaggcatggatccgagaagtcctcacatgctcacatgcagaaggcccattccttaagtaattagaaatccatcatctaaaaaaaacaatgaccaaatcacattttgattaggattaaaaggtggaggctgggcatggtggctcatgtctgtaatcccagcactttgggaggccaaggcgggtggatcacttgaggtcaggagtttgagacctgcctgggcaacagggtgaaatcctgtctctacaaaaaatacaaaaattagctgtgcatggtggtgcatgtatgtggtcccagctactcaggaggctgaggtgggagaatcacttgggcctgggaagtggaggttgcagtgagccacgatcacgctactacactccagcctgggccataaagtgagactgtgtctcaaaaaaaaaggtagagacaatagtacaggtaccttgaaacatccaaaaacccaaaagcttttctattctgaaaggatcagacaattttcttataagaaatatattttttctgatgaggctttgctggagatattaccagaacaagtgtctccaaccactggtagtctggaaaatgataaaggtgggttctgggtggcacagtgaaaccagcctgagattacaaacctttgctgggggtaaactacagaagcaaccatggagacttaattctgtgtttttctgagattctataattaggtaatgtcatttacatgcttccaagtgagggaaggaaattctttggaggcaaagcgtaacggttccagtactggcaccaaatgtcttcctgctcagcaagtccattttaaagtcttgttcatgagctaagctgagttctcctacagaagcagagtgaagagtcaaggaaatgtgaagactggccaggcacggtggctcatgcctgtgatcccagcactttgggaggctgaggcgagcagatcacaaggtcaggagttcaagaccagcctgaccaacatggtgaaaccccgtctctactaaaaatacaaaattagcctggcgtgctggtgcatgcctataatcccagctactcaggaggctgaggcagaagaatcgcttgaacccaggaggcggaggttgcagtgagccgagattgcgccattgtactccagcctgggcaacaagagcgaaattccatctcaaaaaaaaaaaaaaaaaaaaaaaaaagaacatacctctttcagcatccccttgcagggtcctccctatctctgtgattccaatagtattctctgaaacaacacagaagagttggcctccctccctcgcctgacatagctctttacacagttgcaattccatgcctcactcaccaccccgttctggtgactttcctctgcacacattccgccttgctctccctcttagtttttaacacctatttagcaaatatcctggaaaaatatttccaaaaaaagttaaaagtggttgtttggaatgatgagattaccggtccactgttgtttgctgcttctttgcatgttttcaacgtctgggcctggaacaagtgcaggtattcctttgctcattccgtaacgatgctcagcattgagtgtgctatcctgactagtgcgaatactccattgcttgacttctcctgtgtccggaacgttacacttctggtaatacattgtacgattgtatttgtctttttcaagaccacttaacaccttcagcttatataaatctcgtagctaactgaagcctccaggttttttcacatgaagtgttcacataaatcatggatctcccaacctattttcatctttatgagtagttaagacataaatccttcttacagtattaaagggtgctagtgtattaaactacctaaatagccagcatgccttttaaaggggctatcatgatctaattcaaatggtaagaattccagggtctatgtcaggtgcccctggctccctctgtgtctcatccccttccattatggatccaaaaaacatgtcttgaaatgttgcctcctggccgggcatggtggctcatgcctgtaatcccagcattttgggaggctgaggtaggcagatcacttgaggtcaggagttcgagaccagcgcctggccaacatagtgaaaccccatctctattaaaaatacaataattagccagatgcggtggcatgcacctgtaatcccagctactcaggagactgaggcaggagaatcacttgaaccccagaggcagaggttgcagtgagccgagatgcaggttgcagtgagccaacatcgcaccactgcactccagcctgagtgacagagaaagactctgtctcaaaaaaaaaaaagaaatcattgcctcctgcaaaaattaatatgcaagaaaattcaagggactagtaatctgtggaaggagggggaagatggtaatgttttatttcttttcggtgtcaattacatgaggtcattttattttataatatattctcttgtatgtgtgaaatacaaattttaaatatgtgataatttaaaagtaatatgtagagttgatttaaaataggaaaaaatgactgggcatggtggtccatccctgtaatcccagcactctgggaggctgagacaggaggatcacttgagccaaggagtttgggactggcctgggcaacatagcaagatcctgtctctacaaaaagtacaaaaattagctaagcatgatggtgcatgcttgtagttccagctactcaggaggctgaggcgggaggattgcttgagccccagagattgcaaatgtagtgagctctgattgtgccaccgcaccccagcctgggcaacagagccagaccctgtctctaaattaattaattaatttaatttaatgggaagaaatgtctgggcactgcggcttatgcctgtaatcccagcacattgggaggcagaggctggaggatcacttgaggcaagaaattcaagaccagcctgagcaacatagcaagaccccatctctacaaaaacattaaaaaataaaaaattcactgggcatagtggtgaatgcctgcagtcatagctactcaggaggctgaggtgggaggcttgctggagcctgggaggttgaggcagcaaatgagctctggttgcaccactgcactgcagcctgggcaacagagagagatcctgttttttaaaaaaaaagagggggggattgggggggaattctcagtatcccttcaattttgaggggaaaaaaggtaataagaaaaaacaaggagaaagcaatagataagcaaatgaaagggaggaaaacagattcaagtttgaaaaggaaaatgaaagaaaagatagcggcctggaagacaggcagagataggaggattagatggagtatttggctgaacagggacaacagaggtggtgaggagtccctgcggcgctgcagagtgggagagagcggaacagtgaaagctacttcggatcctccaagaaacgtcagcaaatccatcctattcctcagcattctgcttcagccacctaaggcagtcagcctcccactgccgttcagcctgtgtggcccagagccaggaagcacgttccctcgcagctctgggtacagattccctatacacatgagtgtctccctcccggtgactcagctgctgtgctttcctctccttccccagggcctgagcagtagcctgcctgatgatgatcaagcagagccctgcaagtttcaagaggaatgtcagtgactcttcactgaaaccccccaggtaggcatgcagtgacaatccagggctttcctggacacattgcaatcctaacctcagggtaaaagccatgtccctgttccgccacagcatggcaaaatcaattccagttggattaaaaagttacatgtttttaaaaaaatgaaaccgtaaaaatgtatgtgactcagataaagtaaaaaaaaaaaaaagaaaaaagtgagtggttatgtgtttttaaaaagacagagatcaaatggataaatattacacaagactagtctaaattgtttggtgtacaccatgaaatacttttttcaacctctggctccaaatctccaaacttttgtccccttccttactccttgtgctgaacagacagccttttagtcactcagttttaagagaaacttcattctggtcattaagactccatctcaggtatgaaaatttcagtaagtgaaggcaaagattaattttatattcgtttaaaggcttttcccgtccacctaaggccaggcttgcagtccctgttctggaaggtgggctgtttgctctttctgcattttactcctcttctcctctctctctgcagtttctttttctttttcttttcttttcttcttctttttttttttttttcttgagacagagtctcactctgttacccaggttggagtgcaatggcacaatctcgtgtcactgcaacctctgcttcctgggttcaagctattctcctgcctcagccacccaagtagctaggattacaggtgatggctaatttttgtattttttagtagagatggggtttcaccatgttggccaggctggtctcgaattcctggcctcaggtgatccatccgtctcagcctcccaaagtgctgggattacaggcatgagccaccacgcccagccctctctctgctgtttcccctctggcgttgtcgggaagggaggggaaaggactaggggaaaggtgcctttatgtaagtcatgcagctgtcctgacagtcaaactctctctctgggagggtccccttgtgtgggctcaagagacctttgagggtctctccagggcactgttgtctgatgcatactgggtcatctcagagtcccactcctaggctcctgccagctctccccatcacagcctggggcacatgatgcagggggctccccaccagacagccagccaccttgggcgggtcaccagccagatggcctgagtcactgtctgctgcattcacttggcccacagcacatccttccactccacattccagatggggagagtgtagctgctctctctgtctgctttctcttcatcccgctgggacgggctgctgcagcaagacttttgcattcagaattctctagatgaaaaggagagaccagtttctatgttcagttagactcctaattcaggaaggggagggcacagggatgggaagttgggggatggggatggagggaagatggggatggggaagaggatgggtccacctctctcagaaactttctcattattctgtgctagtgtcagcaccagatgggccttcagaccccagcatctccgtgagcagtgagcaaagcggggcacagcagcctcccgctttacaggtaggtcttggtttctcccagtggcaagcttggagtccatctggcaaggaagagcccataggggaatcgccccacaccacactctccctttacatctgtcctgtgcttgggtccctttggtggtctggtgaagctgtggactccttagaatgatgtttttggccgggcacagtggctcatgcctgtaatcccagcactttgggaggccgaggcaggcggatcagctgaggtcgggagttcaagaccagcctgaccaacatggagaaaccccgtctctactaaaaatacaaaatttgctgggcgtggtggcgcatgcctgtaatcccagctacttaggaggctgaggcaggagaatcgcttgaacccgggagatggaggttgcggtgagctgagattcattacatcgttgcactctagcctgggtaacaacagcgaaactctgtctcaaaaaaaagaaaaaaaaaaggacgtttttaagtttataaaataaaatatacaggactacaaaggttatcaattacattgaaatgcagttatcacaatcatttgaaaatgtgtactctagtaataatgcttctttttaaaaaaaatcactttattaggatataattgacatacaaaaagctgtacctattcaggccaggctcagtggctcatggctgtaatcctagccctttgggaggcctaggtgggtggatcgcttgaggaaaggagttcgagaccagcctggccaacatggtgaaaccccatctctactaaaaatacaaaaaaattagccaagcttggtggtgcacacctgtaatcccaactactcaggaggctgaggtgggagaatcacttgaacccaggaggtggaggttgcggcgagctgagatcgctccactgcactctagcacgggcaacaagagcgaaactccatctcaaaaaaaaaaatagttgtacatatttaatgtatacgtgcacccccatgaaactatcaccacaatttatgttataaacatatccatcatctccaaaaggttcccccgccctctgtatttatgtgcatgtgtgcacgtgatgggggggggtgggatgagagcacctaacagttaagatctaccctcttggtaaatgctcaagtatgcaagttctgttaactatagacagcatgctctccagtagctctttagaacttgtataagggaaatgttgtaccctttgaccaagccctcctgtttcccactcccccagcccctgtcaaccatcattctgctctttgcttctatgtgtttgactattttatatttctcaagtgaaatgatgtagtgcttgtccttctgtgtctggcttctttcacttagatgatgctttattaaaacatagtataacaaggtctaacagtgatttctaactagtgatgagtataaaggtattttgctatatctgcaatagctgtatgttatatgaaaacacgtgtgctttctactagagactaagttacagttgttgctggtactactatagtttgttgcgtacattcataattgggggaaatgcaacatttcagctagaggatagtgaaaataaggatggaatatttttcccattgatgtttgcaacctgccaaggacagacaaagaacccttgcactagactgactactgcctgctccagggaatcctcccacagccttcctggcctctgcttatataggtcaggagggtgcaggggacatggctgcagggctggtttggtggcctcttggtgaggtttgcagaatcacctggcaacttccctaggagtggagagacatgaaagccaatgctactcagcttttttttttttctgctacgcactttattagcaacttagctttttttttccctcataacccatagacttagcaggaggagcatagacattaagagtaagtgcacatgaaacattgaaaaggagtaaacatgaatcctctctttgcaaaagacagtctcagaaatttctcatctgctaattcacttaattcaacaaattacatctatcatgtttcaagtgctttgtttatcgatatagtggtaaacagaatacactgatgggacaagcaactctgagatgacagaacgagttccctaaatagtctgttactgtgactcctgtttatgcttgatattcacaaaatattctggaattgatacccgagaaactgctaacagtgattacctctggggagtagagatggaaattgagaggaaaagaagggaatgtcttttcatgttaaactcctttgtactgtctttaaaaataataataaacatctttttatatgatgaaaaacaagttgtaaagacaactttaaaagttttcctaaaggaaaccatatgtgactttaactgatttgagacagtagaagctttctaagtataaaagtaatagaaggaacgatgggggaaattgatagatttcactacacacacaaaaaaagatgcaaaacacgtcacagaccaaaaataacaaacttaagaaatatttgcaacaaaaattaaaaggggccaggcgcagtggctcacgcctgtaatcccagcactttgggaggctgaggcgggtgaatcacctgaggtcaggagtttgagaccagcctggccaacatggtgaaaccccgtgtctactaaaaatacaaaatcagcatggtggcacatgcctgtaatcccagctactcaggaggctgaggcaggagaatcccttgaaactgggaggtggaggttgcagtgagccgtgatcatgttgcaaaactccgtctcaaaaaaaaaaaaaaatagcctcagcctcccaagtaggggggactacaggcatgcaccaccacgcctggctaatttttgtatttttagtagagacagggtttcaccatgttggccaggatggtctcgatctcttgacctcatgatccacccactttggcctcccagagtgctgggattacaggtgtgagccatcgcaccagctggaaatggtttcttaaataagacccaaaacggacaaatgtttaaaaacgtaaattgaattacatgaaagttaaaaacttcaacacaataacagacatcttagaaaaaatgtaaaaagtcaaaagcctaaaagaaagtgtttgcaacacgaaaaacaaagcattaatatacaaaacatgctaaaattattttaaataaactttaaagaaaatacaatagaaaaaaatgagtaaatgatacatgcagtaattcacagaagaaactgctatagtcaaaaaatacaggctgggctctatggctcccagcactttgggaggccaaggcaaatggatcacttgaggccaggagttggagaccagcctggccaacatggtgaaaccccatctctactaaaagtacaataaatgagccaggcatggtggtgcacacctgtaatcccaactactagggaggctgaggcacaagaatcatttgaacctgggaggcagaggttgcagtgagccaagattatacaccattgcacctcagcgtgggtgaccaagtgagactctgtctcagaaaagtagtaataagtaaaaataaaacaaatgcaggaaaagttgtacaactttaccacaaacatgtaaatgcaaataaatccacatttcactcccacaaatcatttcactttcccatatgattagaaaaactttaaaattttgacaaaaccaagtgttagagaggatcgtgggaaaccaaagattctcatgcactattagtgggaatgcaaatttattcaatcactttggagaaaaagttggcattatccagcaaagtgaaaaatgagtacaacctctgacccaattctgcttctgaagaaacacttgtacatgtgtgcaaagagacaaataaagatgtttactgcagtgttgctctatagtagagattagttggaactagctcaaacgtctgtgtgtagaagaatggataaataaactacaatggaacaatatgtgcagtataaacaaaggaaccagatttatacgtagcgacatcaaggaattattaaaaacaatgtggccgggcgcagcggctcacgcctgtaatcccagcactttgggaggccgaggcaggcagatcacctgaggttgggagttcaagcccagcctgaccaacatggagaaaccccatctctactaaaaacacaaaattagccgggcgtggtggcacatgcctgtaatcccagctacttgggaggctgaggctggagaatcgcttcaacctgggaggcggaggttgcagtgagccaagatcacgccattgcactccagcctgggcaacaagagcaaaactctgtctcaaacataaataaataaataattaaataataaaaataaaataaaataaaataaaataaaataaaaacaatgttgaggccaggcacagtggctcactcctgtaatcctagcactttgggaggctgaggtgggtgaatgacctgaggtcaggagttcaagaccagcctggctaacatggcaaaaccctgtttctactaaaaatgcaaaaaattagctgggcatggtggcaggcacctgtaatcccagctactcaggaggctgaggcagaagaatcacttgaatctgggaggcagaggttgcagtgagccgagatctcgccatttgcactccagcctgggtgacaagagtaaaactctgactcaaaaaaaaaaaaaaaagttgagtaaaaaaaaaatgccacggatagttttatacagtataataccacttatttaaatattcttaaataccaaagcaacattaaatatttacagatgtatttctacctagtaaaagcataaaaaggtgattgaggccgggcgtggtggctcacacctgtaatcccagaactttgggaggtgaggcaggcagatcacctgaggtcaggagttcgagaacagcctgatcaacgtggagaaaccccgtctctactaaaaaatacaaaattagctgggcatggtggcgcatgcctgtattcccagctactcgggaggctgagacaggagaatcgctagaacccaggaggcagaggttgtggtgagccaagatcatgccattgcactccagcctgggcaacaagagtgaaactctgtctcaaaacaaaaagaaaaaaaaaagtaattgatacacactaaatttctgatggaaaggaaatggggaaggaaagaggagaagtgttattgtactttcctatactttaaaaaaattttcccaaaaaaagcagtacatgtgaaattacgaaggagagtgtctgacttttattagatacttgctaaattatagctatccttgaagttatctatcaagaacaggtgctaaaatgtacttgcttcctgtttcccaactacaccaactggtggcttctcctcatcccacgtgtgctaacagcaggctctgtgtatcacagaacaacacagtgtgagccttgagcctcatgtcaagccggtgcttctcaacctggggacaattttcactgccaggggacacttggcaatgtctggaggcattttagtcgtcacagctggggcagagggcgttgctactagaatggagagtgtcgaggccagggaactgctgaacatcctgagattctcaggacagcccccaccacaaagaaccatctggtccaaatgtcaatagtgccgaggttgagaaacccaatgtaagctcatagaaattaacataaataaccgttgcattgaatctaatatactaaatttgactacttttctgatgagtcctttttataaattatcagacaagtgaagccacatcttctttctaatctttctttctaatactggacactgactagaccggagagtgtgggtgatagagctgcttctgccaaaaccatggcctctagtttctcttctctgtatccacagcaggcagaatggcatctgttggaaagggcatatactctaaaatctttttttttttttttgagatggagtcttgctctgtcacctaggctggagtgcagtggtgtgatctctgctcactgcaacctccgcctcctgggtttaaacgattctcctgcctcagcctctggagtagctgggattacaggcatgtgccaccgtgcctggctaatttttgtatttttagtagagatggggtttcaccatgttggccaggctggtctcgaactcctgacttcaagtgggccacctgcctcagcctcccaaagtgctgggattacaggtgtgagccaacacacctagcctctataatcattttaattgggcaaaatattatggaatttttttcagtcatgaaaattaatcaggcttgcattctaattcagtctaaccctggctatttccaaagccaaaggaagcacaacacaggtatttcttttcaacctcccaggaaatagttcaactgatccatggaccagatgtcaaatctacaccattaaatcaccttctccatagtcttaaagttcaattggccaaatcatgcatgaagaggctaccagtcatggttacattcagcttcatagcataaaactgcaaaagacaaaggcatatataagattaaatttcatttttctctcagttaaaagaaacctagagataagcagtccagagctgctttggtagctccatgacatcatcatgctccattgcattctctgtgcccctcatcctcatagttccagatgcttgctgaagctcccccagaacatccctgtttctaagttcaaatcagcaggaaggagaagggaagggcatggttctactcttttaagaacacttccaggcagctccttgcaacccaactacttttatctcactggccagaatttaattacctgaccatacttaatggtcaaggaagcagggaaatacagatttctagctgggcagcaatgtgcctgggtgaaaatcaggatttctttgctaaaggagaagcaaagagtgggttttggaaggcagctagtagttgatgctgtagactggtcctctggcagatatactcatgaatactcttctgcccctgtgtagacctaggcatttcccatccagttagtgcatctcactcaaagtccagaatctctaggtgatgtgctcgatcatgtctgcatgtgcctcctcatggtctggtaatttgcaaaccaaaaaatgttatctacatttacatgcaatataattgctggcataggagcaaaataagcagacacacagaaaaactcacattagaaaagcagggaaaggctgggtgtggtggctcatgcctctaaccccaacattttgggattactcagatcactggagcccaggaattcaagaccagcttgggcaacatagtgaagcctcatctctacaaaaaataaaaaataaaattttttttaattagccaggtgtggtggtgtgtgcctgtagtcccagctacttgggaaactgatggtgggagggtcatttaagcccaggaggcagaggttgcagtgagccaagattgcaccactgcactccagcctgggtgacaaagatcctgtctcaaaaaaaaaaaaaaaaagaaaagaaaaaggaagagagaaatattgcaggtattggtccatagcaatgatcaaatcctgctggaaaagaaaagaaaaaggaagagagaaatattgcaggtattggtccacagccatgatcaaatcctgctggaaaagaaaagaaaaaggaagagagaaatattgcaggtattggcccgtagcaatgatcaaatcctgctggaaaagaaaagaaaaaggaagagagaaatattgcaggtattggtccatagcaatgatcaaatcctgctggataggaatggcaaagactccctttgggggcagagaaggtcattccttgattgagctgctgccttgaaggatctctcttgtccattgcccccatggcctctggctttgccctctcaggggtttttccttgtcagttttcctctatggctatatctgagccctgggcattggagataggatcatcttgaagctgcatggtttccaccgccaacttcttgcttgtgcaggtgcaggttcccaggaattcttttcagagttgtctaatcacagtttttgcaggccaagcttgaggtttctgtccaaacataggaagcttccatccaatctctttgcttccagtcaattccaagtgtgggttactacagcctaacactgcgtccagaaacacttctcacgccccaaggctctgatcttttatttagagctctttatgctctggccatcctttccctctccaattggcctggctgccttgagaccatttgaaagaagaaagaagttgggtgagatgggaacacgcttaatctaatctttgtgtctgggcttgtttccattgtctggcaaggaacctaggaagatgctcggaaagtgcctggggccacagccttatctcctgccaaggctggatgggcttgcactcactggaagcagtatttttcatcctacaagactcccagttacaggactcatagctgagtttagattacaggcagagtctaatctttacaaagctatgtttccttccatctctgttggcaggcaggatagctccagatgagtttatatctttatcacagctcttagctaaaagctgcaagatgcaatcaatacaaaccaaaattttacacttcttaccccttcccccagccacatcttcagtttgcatgttgcttgctttatattattcaggaaatggcaattttgagcaaatgttttgctacagcataacaagggtcactaattttccaactgatgatatctgctcaccactgctccatgtctgatcttctccactaagccaatgacacaattggattttattatatatatcatccaactcatgggtgttgaattttatattgattaggataaggtttagttgcataaaacaggaaaatgcaaaataatatgtctaaacataatacaaggtggtaaccccacagatgtggcttgtcagatgtgtagtatgataagaaacacaatttgcttattaattataacagttcctagtaataacttgtacctgagagtatatgacttagataaaatacctacaggtgagtgtgataacagctccttttcctatgtagcttgtgagacttttctcaagttggaacaggatttaagatgtagtttctcataaggagggatccaaagattttatgataatgtcgactaattcctgacccagaagtctgcagaggctggtgaaggaggggtggggagctgaatcactactgagcaggacgaaggtcagatgggagttgggaaggagagtgtcgagggaagccatcagtggggcccaccagtccagaatctgactataaaattgctaaatagctcaggcgcgaagtctcacactgcaatcccagcactctgggaggctgaggtgggaggactgcttgaggccaggaatttaaggccagcctagtcagcttagtaaaaccctgtccctacaaaaaattttaaaaatagccagacgtgtggtgctgcatgcctgtagtcccagctactcaggaggctgaggcaggaggattgcttgagcccaggagttcaaggctgcagtgagctatgattgaacccactgcacttcagcctggacaacagagcaagaccctgtctcaaaaaaaaaaattgccaaattatgagacaaagagaaagagagtgcatgttgaaatcaaggaaaagtccagagtcctactaccactgattactttaagaaccaacatttcttgtcactgtgtgccaggcagtgtactaaattctttacatacctttactaatctctaaaaaccttatgaggtagatactactatgatcttcattttacagataaggaaactacggcttaaagaggttaatttttccaaagtcatagcaaatagcagagccaagacttgaactcaggtctctcagagagcaacgctaatctcttaacctctatggtaaattgtttgtaaagtagatttgagcttttttttttcttcaaagaaatgactctcaactgtgtcaactattcagcactagccaatcattcatcacctatgtaatcagtctggtttatgaggaaagatatctcagacatacatttcttttctttttagagacaggcccctggctctgttgcccaggttggagtgcagtggcatgattatagctcactgcagcctcagtctcaaactcctaggctcaagcaatcctcctgcctcagcctcccgagtagctagtactacaggcaggtgccactatacccgactaattttatttattgtagacgaggtctcactatgtggctcaggctggtcttgaattactggcttcaagtgatcctccaggctcagcctcccaaagtgctggcatgacaggcctgagccacctcgcctggcctaccccagccatactttactaatttgtattattaagccacatgtcatggactctatgaacaaaaagggggaaagaaagaggttggcatttaggaaaatgagaaaatagaccaagtatgatttgaagaccttttattcctctctcagaaaaccccctctttccctccctcctttctttcatcaaacacttagtgttggccgggctcggtagctcacgcctgtaatctcagcactttgggaggctgaggtgggcagaaaagatcacttgaggtcaggaattcgagaccagcctggccaacatagtgaaaccccatctctattaaaaataaaaattaaaaaaaaaaagttaaataacactgagtgtccactctggtcaggtaaaacactgaggagtagaagtgtcaccagggtcaaagcccagctctgcacttgcagaacagggcgtccagtgctgtcagttaagctcaggtgttgtgtctgcaacgagaggcagctggtctcatggggaagtgagggtagaaatccttttgatgaggcccaagctgaggcctgggaggataaatagaagcttgccaagtgtgggcagactggaaggcaatcccagtagtggaggcaacagtgcacaagcccagagcaggagaaagcatgtgttcagggaagtgttgatgataaccagaatgtgggagccatgggtaggggtgtgacaggaatcagcctgaagatgcctggcatgctacactcaccagcatggacttcatcctagcgagataaatgttagatacaaacgggacatccaatgcatgctttagaaggttcattctagctggctgggcgcggtggctcacccctgtaatcccagcactttgggaggctgaggcaggtggatcgcgaggtcaggagttctagaccggcctgaccaacatggtgaaaccccatctctactgaaagtacaaaaacgagccaggcgtggtggcacacacctgtaatcccagctactcaggtggctgagacaggagaatcacttgaacccgggaggcggaggttgcaatgaaccaagattgccccattgcacttcagcctgggtgacagagcagactctctcaaaaaaaaaaaaaaaaaaagtttagtctagctgcagggtagagaatggtttgaaagatgacttcaatgaaggaaatcaatgagtctatcaaggtaatgcagtgatgaaatggtgagacccagacctagggcacaacaacaggaatggatagtaatgaagagaccggaatgctgctgaggaggtggagagaccagagcttgatgcgtgcttaagcctggtggctgagagaggaggcggggtcaggcccaatgtccaggtacccagctcggacaattaggctgatgagtgggtccaaaaacacagggaagagagaagcaggtttggaaacaggttcaaatcaaatagagctcacaggagtccagagttcacaggacagatctggcctggagaagaagctgtggggtcgctggcatagactaatgggagccaggggaaggatgagattttcccagaagaggactgttggcctcctgccctgcaccccacatagcacacactggccaggtcttctcgctgtgccggcccctcaccccatctactcttgggggtcctgctccatgctgcgttaccccaatccccatcctaaattagttctgtgtccctttctctcagggtctttcctagctactctggtgaatgatttaatgttaaaaattcataggcattggtcaggcacagtggctcacgcctgtaatcccagcactttgggaggtcgaggcgggccgatcatgaggtcaagagttcaagaccagcctggccaacatggtgaaaccctgtctctattgaaaatccaaaaattagccaagagtggtggcgggcacctgtaatcccagctactcatgagattgaggcaggagaattgcttgcacctgggaggcagaggttgcagtgagcagagattgtgccactgcactccagcctgggcgacacagcatgacttcatctcaaaaaaaaaaaaaaaaatcatgggcattaatgcattattacccaaaacatttctgaattttaatcaaagagaatcaataggatttgaatccatagaagagctcagagcatttcctttcttttatttatttatgtatttgtgataggtggttattactgaggtgacctggccctcatgtcccactcctgccactagaaatctcatttccccaactgtgcgttttccaaaagttgaatatttcctttgcttttcgtgcacagatataaattgcttcccaggtcctgatcctttttaccttagagagcctgtaccagcacttagtgcatttattcatctttgtaatggacaactgcgattgtggctgttttagcacaggacacagacaaaagggaactagaactgtttctcaccagtgcaaggcccttgagtcagaaacacctggcagtgagtggcaaagaagaaacaactgtgaagttaaatgccaataccccagggaagctttcccacaggaatcattagggacttcttcaccatgttcccatggcagtatgtcatttatcatactgcactgcaattcttttgttttcaagtcagtctttccttctacattgtaagttccaaggagagaaatgtcgtaccttctccatctttgtactgcctgtccctgtgccttaacacaatgctgctgtagatagcaggtgtttaataaatatctattgggtgaatgagtctgcagagatatatgtcattcacagagcatgtcagggagcttctcgacacaccaagtcacactgggaggttttccagggaatataagattccttttgctatgttgacctcttgcttcttgacctttgcatgtgctgtgcccgtgatttcaagtacatctctcttcatccctaattaggtaacagctacttagtcttcttaaaattaataaatatcaaggctgagcacagtggctcatgcagttggggaggccaaagctggaagactgcttgaggccaggagtttaacaccagcctgggaaacacagcatttttttccaggtgaaaaacatcatttttcacctggaaaaaaacataaaggatacatactaataacacaggctatatggcaaatgtctaactggtggagcttgagaaagagaattctgagggaagaaaaacagaaactgatagcaagacttggaataggagcaaaacaggagtatgatggcattgggagattccagggaagttcgggaagccaagaggatgaatggacacgggggtaggggtaggagcgtgggaggtatggggaccaggataggaagacatacatggttggatggagagactgatggcaaagacacacacacacacacacacacacaaacaaattttagtaaaaaaaaatataaagaaaagaaatcttggcaaactgtaaaactaaagatggaagaaggagaggtaaaaagggaaaatgtgcaaaaagccaagaagtatcttagcttataattattcatctctaaaggcttctatgaaattattccttctgctattcaaagctttcctaaaattctgctcttcctagaagtctttaacagcagagaagtaaacatcttacctcctataatagaacagtgagactggaagggatcttagcaatcaccaagctccttcgtttcacacagaggatggaagtgactcccctgtagacacactgttagatcgccttggagcctgagccaaagtcacagtctgtgtatttctagaatagtgtttattccaacaggtaatttttttctactccattttcccaaacaaatgaccttctcaaaaactggggggaaaaagtctgttttttaaagtaagtcaataaacatttcattgtgaaggactaagcaataggcctgggaggcaagagctggtttttgtactcacagcacctagcccagagcctggcacaaaagtagttttcgatagggttttgttggatggatggatggatggatggatagatggatggatggatggatggatggatggatggctggatatgagatagatggatggatggatgaatggatatgtgatggatagatggatggatgaatgaatgtatgatggatggatggatgaatggatatgagatggatggatggatggatatgtgatggatggatggatgaatggatggatgaatgaatggaaggatagatggataaatgtgttctatttagggctgccaccactattcagatagttattgaatagactgtttcaatgttttctgactttaagaggtatttgatctaacttgcttctgcatatgggccaatgatcccaggttgttttaaagaattcttggtaaatgatctaattaataaatgagatgttttcaaataagttataatctcatcggaaacctaagacatggatgtaagcagaaatgattagcaatacaggaaaacaatgtgttaaacgccaggtgactattcttgcagataagctgtaagtagagtgatataacttattttctaaagtgggtccccttcgagagtgaaagagggccttattaatacaccaacacaataggaaaaaacagggctatatggtccaagtagggggttcagatgagagggcagatttcccatgtactgaggaggcttcttgaactttgcttgtgctgtgccataatttggagcacgtctctcttcattcctaattaggtaacagctacttagtcttaaaattaataactgtaaaggccaggcatggtggctcacccctgtaatctcagcactttgggaggctgaggctggaagactgcttgaggccaggagtttaagacaagtctgggcaacagagcaagactctgtccttgcaaaaaaaagtttttatttaatttaatttattattattattattttgagacggagtcttgctctgttgcccaggctggagagcaatggcacgatcttggctcactgcaacctccacctcccgggttcaagagattctcctgcctcagcctcccatgtagctgggactacaggtgtgcaccaccatgcccggctaatttttgtatttttaaaagagacggggtttcaccatgttggccagctggtctcaaactcctgacctcaactgacccacctgcctcagcctcccaaagtgctgggattataggcgtgagccaccatgcccggccaaaaaaatttttttaattagctgggaatggtggcacatgtaggtagtctcagctactcaggaggctggggccagaggactgctggagcctaggagttcaagtctgcagtaagctgtgatcgtgccactgcacaacgacaacaatcaaattaatatatgtgatgtattaaaaataagtttgaaaagtgtgtatgaatgacaaaagctagaaaaaaaattaaagattctgtacatactgtaagtatatagacaggagtttgttatctcatttaaaaaaaaatcacgcgtgtctttctagagttttaaatttcagatatttggctttgagcaaaatactcttttcttttttcttttctttttttttttttttaagatggagtcttgctctgtcacctaggctggagtgcagtggcacgatctcggctcactgcaagctctgcctcctgggttcacgccattctcctgcctcagcctcccgagtagctgggactacaggcacccgccaccacgcccggctaattttttgtatattttttagtagagacagggtttcaccatgttagccaggatggtctcgatctcctgacctcgtgatccgcccgcctcggcctcccaaagtgctgggattacaggcgtgagccactgcgcctggccaaaatactctttttaatggtttaatgagagtagcctagagtttatttttaaatggtagaaatgttgctaagaatagggtaggtttatatacttgctatacaaactgtggtccctggagtcgcagcatcagcaacacttgggaatccgttagaaatgcagattttcaggcctcacccagacctatggagtcaaaatctgccttttattgaggtgcccaagtgatttgcaagcacattaaagttcaagaagcattggtctatacaaccttcagtctttcaaaagtgtgaaatttatttaagcatttaagtatacctttcctactttgctcttcttctcctttgtaaaatgtattgacagtatgcttccttttgcttttaagccatttaagtgtctagaactttaatgataataatgaagagggctgttgtttacaaagaaaacagtaagaataggatgaacaccctagattcccataatacatcccccattcaggggtagcgatggacgaagactcaaattcacatgataagctgctccattttggcatgaaccagtttttaactctagccagtcaatttcgtttttaaaacttctcccaggagaagaaaaaaagtgatagaagaagaaaccatacttagaaatgcaaactattcaaggaaatcttgactttcagtccttgtaaatactgaacaaaaggctttatctttcacaagttgaagaaatattaacatgctatgggggtgtctttcctgcgactgttttgctggctctgggcccggcatgaatttggtagtactgggcaaggccacagctgcatgccggcctgcattgcatctctatttttgcaggcattaaatagcttctcccatctccaacatgtgttgctgcacatgtgacccaatgaatcaatcccctgtacaatgaagcaacaataatgggtctggggcaattagcacagggacagcaggtcttcctagcagactcttgcccacgttaatattcgcagcatatcctgggtgggtgctcctgagaattctgctaatgccccattaccatcctcagggctggtaattgcaagggtagagatctgttgcagcttctgggcagccgttcccttccttcccaagatgaatgttgtgaagggcaatgagggggttgtgagtgcctccaaataaaggtcttttatagctctttaaagctgtaagtcattcagtcatagtttctttcacctgctggcttgacaactttaaaaatttacatttctgaacttgtactttaacaggctttcatcataacttcgggaaagaagaattagaatggggaagatttaggtgcacagatggggtcgaaatcaggataatattgactaagcaccctcctggggctctcctaacacaaacgattaccctgcctcctaggattttatagttcaaatagaataggtgagcactaaaacaatcaaatctgttatcctgaaaggccaaattggcaaagtggttcctagtgaaaatcatggaatattagccctcaaagatattttaaagcccacccctccttttttggtaattgtctgtgaaatgaggatcttacagaccctgcctcatcacatggcggcgaggaccaaattagacaccctgggagcttgcaatggaaaagtctttcatgtctgcaaaggaaaataatgtgtgtgtgtgtgtgtgtgtttgtagataggtaggtaggtaggtatgtaggtaggtaggtatgtaggtaggtagatagatagatagatttttttttttaagacagcatctcactctgtcacccaggctgcagtgcagcagtgtgatcttggctcaccgcagcctcaacctcctgggctcaagcaatcctcccaccttagcctcctgagtagctgggaccacaggtgtgcaccaccatgcccggctaatccttctggtagagacggggttttgccatgtagctcgggctggactcgaactcctgagctcaagcaatctgcccgcctctgcctccaaaagtgggggatggaaagcatgagccacggtgcctggcctaatatgtgtatttttaatgatctttattgttttaagctgaaaaaatagactcaaaggagtcaagtggtaacaagacaagagctcccttagaggtgctcacccacctgcatgctaaactgtatgaggtagctttcctcttgggctgtcagtgctaaagatgtgtaataatgcagaatacctgtactctggactctcactagagaatacagctttgaactccctgctgttcaatcccttagcaaaatactgatttttgagaaataatgtttgtgaagaatcgcctgaaggttatgcaaattctccactctgctggatatcctaaaatttacctatggatcaaacctgattgtcagggcactgtgtatttggatcccaggtatttgcctcctggtagtagtaacttgactgaactgtgcttacatgaaggggtgtgctatcagacccaactgtaagaaatgcattattatattcaacacaaggattttatggagaacctgatctgatggattgctagattcctctttatgaggactcacagtgataaatttccttggggctgcagcttcaggagaaacctggcttctactaaacaactttttaatcttatgattaaagtatcagcctcttccctctttgctctggccactaggaaacttggggccaaatttgtttatcaaatggattccattgctctgtaacaatcttggttttaatgttcttaccccctttttccctttggcaatttgttttatctatgtagttgcctaccttttgtaaatcgacttgtttttaaaaattaattatccctagctacttgggaggctgaggtgggaggatcatttgagcccaggagtttgaagctgcagtgagctatgactgcaccactgcacactacagtctgggcaatagagcgagaccctgtctcttaagaaaaaaaaatcaattttgattacttcataaatttcagttgaattgagtctctgacatcattttccagtgaagccttgaatcagtctttaagcaaactattttcatcagctggaccttggagatgacactcaactatgatttttcagaggcatgtgttaagtcatgaatgcaaaccaatcacattttcaagtctctgaagttggccgattttcatttcagaagacatatttagctttgtaagatctcttaaatttataaacagacattgaagggtaaataggcacttgatctttgatacatagttcttggactcaccaacaagcaaaacaataatatctcagtccgttgagctgtatcatttgggttttgtgacaatttggacaaagagtggttgaagtttactctttgctctctgagtatattaaacaaaagagtttaaattgtaagaaggaatatctgaatattaaagagctatttcccaacagcttttattcctatttgcatattaaaatgccattagattatctttataatctagcactgctctgattggtactttaatatgcctattacagacccttcctatttgttaaattaatatttgattactataatttcgaaggaaatccattcttgaatgtcataaatatgtactcttgaatcatatcctataaattaaaatatttactaatatgtgtggtcttgaaaatcattccaaattcctgaaatcactctgaaatgtaagtaatacatggtatgtgcctttttgaaatatttggaaatgtgtctgcttacttcttttttgaaatgacccctttcttgaattctggaatattgcatcctctttcttttagttctctctctgattaagcctttgtcctgtttgttgttgttgttgttgttttttgttttttgttttgttttgttttgtttttgagacagaatttccctcttgtcacctaggctggagtgcaatggcacaatcttggctcactgcaacctctgtctcccaggttcaagctattcttctgcctcagcctcccaaagtagctgggattacaggtgcccgccaccatgcccacctaatttttttttttttttgtatttttagttgagacggggtttccccctgttggccaggctggtcttgaactcctgacctcaggtgatccacctgcctcggcctcccaaagtgctgggattacaggcgtgagccaccacgcccgaccacctttgccttgttaaacatttcttcctcttcacacccctaattgtgtgattccccaaattcagcatttcttccttcatgctgacctaggataactaaaccttcttaaagtatcaactatcattcttaacagatgactctgggacctgaatatcacttgagttccaacttcttagattacccactggatacttctactgtcacctcaaattcattgtgtcaactattaatcattactgttcatttcatgttagtggcatcaaaagacttagcaataacaagaaaacttttatcaattatatactacatactacaacggctgctttaaaaacaaatctcacttaatcctctgaaccatcttataggtgagttttaccaccttcactttacctattaggaaattggaaataagagaggtaaagaaagtatacttgtctcacagcaagtatactgcaaaacttgaactcaagtgtcatgttaagtggtctcccaaaaattatatctaaaattaaattatttttattttctctgtaacaaactttcttcttgtatgcctatttttgcctatggtaccgtaattctccttcatatggaaacttgaaattgtgaaggtttttccctcctccttattatttctcctgtcaaatccatctgtaagtcctgtaatattgcctcgtcctgattttcctttcttccttcctctagttcacacacttacccattaaggtctccaataaatctctgccctctctttctgcttttagctccttgcacattctcctcccctgaatggccactgaacaacctttcagaaggcagcagttgccctgtcctctagttgaccagaagccttcagctgatacaatgtcttaaggtcctttccctgacagtctaagctttccacatttcgactccaacctacttttccaatagctgataaaattcactccactcttttgctctcttcacactgcttggaataggcattttactttctgccttctaaactttgctcactcagccttgcctctcaaaataaatatcctcccacctctttcccttaaaatgtccaactcaagtctctgagttggctctgtggtttttactttcctctaaagtttacctactgtatttattatttgtgttactcattcagcagaagcatatgttgccctgtgtagtaattgtagtaattaaaattatcgtgtgtatgtgtgtgtgtgtgtgtgtgtgtgtgtgtgtgtgtatcttgcctccttggtcagattttaaaattcctagagggcaaaatgaattacaaccatcttctacatctctcagatgtttgaaatgagtttacatgtaaatcattctacaaacaatatagtattcaaagaaagcaaattactttgatagaggcaacagggtataataaaaagaacatgggttttgaaattaagaatatatgaattccaatccaatcagctgtgtgaattcagtcaagttcaaattttttaataatatgggttacttttgtcaccttatagcttattgtgatgttcatagcttattacaagagaatttaggccaatccctgccatccatgtatactgaaaagcaaaactattgtggttatttgatgactgaagggtatcactgtcttttcaagtcttgtgtgagcataagtgattggtatgagtcaccattgtacctataactgattgacatgaataaatatacagaatataaactccaactattttttaaaagtttgttggatatttctgtatttagaaatataactttagtgttgaaatagttgtcatctaaaccaatgatgcccaaacacaggtctgcaagaaaatgagaaaaacattattataatgagttttttggttaaactaagtaatgcaattgttaggattattctgtattttgcaattatgactctcctactttttgtgtgggttaacatttctttgctttataaaacaatggtcatgatacatggtagaggacagtagctgtggtttttgttatttctatcatggcttttcttaacaaaaccaagttagcaaactgatgttcatttccacaatagctttgaaaatgtcacagatccatattacctcaaatgcttggaaaccataatctagcccaagctctttgttttagagttgagaattatttgacttacagaagttaaattatttgtccgagatcatgtaacttactactgcagacccaatatgagaattcaactctattaactctcaatgcagaatatgcctcattatttaagtgaaaaactgtcttttctacaaatgaaaagaaaactctatttttcgtataacttttgaagaaaaggcattgtgtaaattttatttgctaaaaataattttattaagccaggtgtggtagttcatgcctgtaatcccagcactgtgggaggccgaggcaggaggattacttgagcctaggagttgtagaccagcctgggcaacatagtgaaacatcatgtcaaataaaaataagtaaataaacttattaaaatcctcccaaaagatggctttatcactaaatgaaagaaactggatgataaactatacatctgtaaaaattttttaaaaacaagtttcctaatttgttaatttcatttttttctacttattttcaaacaaaattaacttttattaaaaatatctttgtggcctggtgcagtggctcacacttgtaatcccagcactttgggaggctgaggcaggtggatcatttgaggtcaggagttcgagaccagcctggccaatatggtgaaatcctgtctctactaaaaatacaaaaatagcaggatgtggtggctcatgcctgtagtcccagttaattgggaggctgaagtaggagaatcacttgaacccaggaggcagaggttgcagtgagctaagattacgccactgcactccagcgtgggtgacagaacaagactcatgtcttgaaaataaataaatatatatatatatatatatctctttgtggccagcacggtggctcacatctgtaatcccagcactttgggaggcagagacgggtggatcacttgaggtcaggaattcgagaccagcctggccaaagtgacaaaacccatctctactaaaaatacaaaagaaattagctgagagtggtgacaaacacctgtaaacccagctacttgggaggctgaggcacgagaatcgcttgaacccgtgaggcagaggttgccgtgagccgagatcatgccactgcactccagtctgggcaacagagagagactctgtctcaaaaaaacactttgtgtacctgaagattctggaaaatataagaggaaggaataaaaaccctataattctagagaaaagtcacaattgacactttaacatagttcctgctacatatttttcgatgtatatttttgtacggttgaaactatactacatatttcctgattcttcattttacgtatttattttaatttctttaaaatatgtaatatatttacatattttaaagcttggaaagaataaacagacatagagtgaagaggctctttctgatctttctacctcaatcacccagttttctttttctttttttttttttttttgagatggagtctcgttctgtctcccaggctggagtgcagtggcacgatctcggctcactgcaaactctgcctccccgggttcacgccattctcctgcctcagcctcccgagtagctgggactgcaggtgcctgccaccacacctggctaatttttttgtatttttagtagagatggggtttcaccgtgttacccaggatggtctcgatctcctgaccttgtgatccacgcgcctcagcctcccaaagtgctaggattacaggcgtgagccaccgcgcccggccaatcacacagttttcttcctaaccaaaattaatacagttgttaaaagttttcatatgtgtatctttccaaagagactttgtgcattttattcagattctttaccttaatattaaaacagattcactttccatcttatttaaaatcatataaaatgtcaattttaaggcccacataatattttactatacagatataccataatttgcttagtcctgattatctatcagacattaaaattgtttccaacttttgagttttagcaactttgtagatcctagtgcttaaattaaaagagcccattgatcttctcattttagaaattgtaggacttggtgggtgcagtggctcacacctgtaattccatcactctgggaggccgaggtgggtggatcacctgaggtcaggagttcaagacccgcctggccatggtgaatcctcgtctctacttaaaatgcaaaaattagccgggcgtgggggtgtgtgcctgtaatcccagctactcaggaggctgaggcaggagaatcgcttgaacccaggaggtggaggttgcagtgagccgagatcacgccattgcactccagcctgggcaacaagagagaaactccatctcaaaaaaaaaaaaaaaaaaaaaaaaaaaaaaaaaaaaaaaaaaaaaagaagaagaaagaaaagaaaagaaagaaagaaaaaagaaaaacaaaagaaattataggacttttacagtaattttccttgaagagattagtttcattttacccctattctcaaaagcaagtctgttgtttttttctgctaaggctagtccatcaacctggggttgaaacaatcctttatctccatgaactgacctcagtgagttacagccacatcctcttatactttggaaagaacatccctcagctcagtgttccataaatatttatagcaggaatgccccagtccaaagtggatggcattttgacctcatcattgttgctgactccctgtatcctgggagcttagagggtcgaagcactgttgtttaagacaccctttggagctcccccttgaaagcaaagagtagttatgcattcaaacatacccaaggaatagcacagcaatacaaaaaaaaaaaaaaaatgatgacccaagtagaaagtatgcccaagaataaataaatgttgatgctgctttcagaggactgtgagagttgatgggctttgtgctgaatgctaaagacactggttcatcatggattggtcagaaaagagtttgcctcatttagaggaatattcgtggagttggtgatgaatagagaaaggtgaggaaggcttcccgaagcagaggagaagccatgaatttgttgcctagaaaaaggtctatgtgaaatagagctcttcagagtgagaaatctggacctacgctatgaggaaattggcataaaaggaccaagaggaagcctgacaagaaaggaaaatacttggttaaaacaattgcagtagaaagggagaaatctgggcttaatatagatagaactgtcaaagataagagtaactgccagaaaaccaacaaacaaaactagataaatcagtgagccttctgggatttttttttttttctgggattctctctcaaccaacccaactcccagccgcatcccaacccccgtagataaagtctattgtccttgtcctattccttgtagtggaaatttagcatgttctcaatttgatgcaaagtgttacgtaactccaggatccagcccactcttctgactatatttccaactatgttataatattactctaagactctcttttatagaaatgttcaaagtaactgtggcaaaattgtttttgctcccaactattgtacacacttcataaaaactatttctacaacctgagagccagttgagataagctcttggcggcagataaagaccaagattgagcactctccagttacatatgtgttaaacagatctttaaacatatcctttcaaagctgtatctcgagggataatttaatataggaatataaggtaccatgagagggtcaatcacagaaatatttttggtgagagtgactttccccatgatttttttttccccagactgagtcttgctctgtcacccaggctggagtgcaatggcacaatctcggctcgctgcaaactccacctcccgggttcaatctattctcctgcctcagcctcctgagtagctgagattacaggcgtccgccaccacgcccggctaatttttctatttttaatagagacagggtttcaccatgttggccaggctggtcttgaactcttgaccttgtgatctgcctgcctcagcctcccaaagtgctgggattacaggcatgagccaccacgcccggcccactttccccagaattgttaaaggtgactacttatgtggtagtattcaaatacccaaagaccacctactctaattagcaaaataagctgtatttgtattggtcccattctttcattattctcaacctgtttcctctctgtaagatggaaataatatctgttttatagaattgtcataaaggttaaatcagatttccagtaatggcagactaaataagtgtgattgagcttcctgctaaggacaactaagaaagctgggggaaaagcattttaagaatctgattcaaagcagtagagaactaataagatgtttaaaaacactgagctagggtggggaagcttggaagcccatggaggtgagcccggagtttctgtatgtttttcccctgtgagcaagaccagaaggcggagagaacaacatgctgagttatgattttgaaagccacaaagatctaaggtgacagggattggtgctcagtttccatcaagggatgggagtcctggtggatgaactcttctcacactggattaaaactctgaaggaccttaaggaaaagagtaattcagaagtaagcacccctagagactacagcttagcttttaattctttcaagccatgaaattgattttaggtgacattttagtgtttgagcacttaggcagctggcaggaacaaacatatcctctctggagaaatataacatcatctcagacctcaaatatatttctacattttgtagatccaatatctggcacataataaaaaataatcagacacacaaggagtaaaataacatgaactaatatcaatagatacagcagacaatagaaacagacctacagaggctacaggtgttagagtttgcacactgacttcaaactaatgatcttattcaggtcaaagagattaaaaaaaaatccaacaagattaagaatttcaaccaagaacaacaacaacaaaaactcaataacaaatcaaaaggatattccagattaaagggtaccaaaaaaaaaaaaaaaaaaaaaaaaggtttaagagcagatgagacacaattaaagcaagaatttgtaaaccaaaagatagatcaggagaaagtacccagaatgtagtagaaaaacaaaataatagaaaaatcagaaatgataatacaacgcataggactgtagtgaaaagctgtaacatacgttcattggaaactcagaagggaagaagagactgaggtagcagcaataataagagataatggctgacaaaattttgcaagctggtaaaataattcaaagactctataaatcctaggaaacccaaccaggataaatacacaaacgaatacctaaacacatcatagtaaaactgctgaaaacccaagacaaagagaaaatggtaaaaatagcaagagaagaaagatagattaccttcaaaggagcaaaaatatagcagatttctcaatggaaacaattgaaagtaggagactataaaatatactaaaagcactgagcaaaagtaagaaaattgccactgaaattctataccagctgatatagccttccataaaaaggtaaaataaataactttttagacaaactaaagcaaatattagatgtttttatagcagaaggaaaatatccagccttggagatacagtaaaaacaaaacaaaacaaaaaaaccaaaggacaaaataatgagttaaatatgtaggtgactctaaataaatattgattgcataagccaataattataataatttttagcaattaaaatgaagaattaaaacacaaagcaacaataaggatggaatatagaattagtggtgttggaacatgggtcagtaggacatggaataaatggtgtaaagtgttctaagtttcttgtccaggaaaaaaataaaagtattggtattacatttagttaagaaaaagacacacttaatatttagggttattactgtatatattttaaaggaatatatggctttccaggtaataaggagaaaaataatagaataatttttttgtagggccaggcgcggtggcttacatctgtagtcccagcactttgggaggccaacatgggcggatcacttgagatcaggaactcaagaccagccctgtcaacatagtgaaacctcatctctactaaaaatacaaaaattagctgggcatggtggcgtgtgcctatagttccagctactcaggaggctgaagcaggagaatcacttgaacccgggaggcagaggttgcagtgagccgagatcatgccactgcactctagcctgggcaacagagtgagactccatcccccaaccccaaaaaagaaaaatttgttgtaaagttctcaatcagtctggaacaaatcaatgaaggaaagaaaaagaaacagaacaagtaggaaaaatagaacatattgaataatacctagaattatacgtagaatcaaaattacacataccagtaattactttaaatgtaaatggactaaatatcccaattaaaagacaaagattatcaaactggattaaaaaataaaagtgttaattgtaagagacatgtaaaacttaagaatccagaaagtttaaaaaacacatttggagaaagatttagctatcatacaaacacaaaagaaatttggttgtaggttttttttcattttttgttttttgtttttgagatggagtcttgctctgttgcccaggctggagtgcaatggcatgatctcggctcactgcagcctctgccttccaggttcaaaagattctcctgcctcagcctcctgagtagctgggattacaggcgcacacccccacgcctggctaatttttgcatttttagtagaggtggggtgtcaccatggtggtcaggctggtctcaagctcctgacctcatgatctgtccacctcagcctcccaaagtgctgggattacaggcgtgagccactgcacccagtcagttgtaggtatcttaatatcaaagtagacaatgtaaaaagcattattggtgtctttataatgacaaaatgcttccttcaccagatagattataacaattttaaacttgtatgtacctagaaacatagtttaaaaatatgcaaagcaaaaactacacagaaaggcttagacaaattcatagtcatgttgggatattttaatgcacctgtcccagtaactaatagaatatttgaacaacataaacagtaaaatacagcaaaattaaacacacacacatatatataatagagagaaaacactgcataacaactaaaaaatacatagtcttttgaagtaccacataaaatatgtataaaacttaagcaattttgtgacataagtgttaacaaattttaaaggattgaaattctacagattatattctttcactacaatgttattaagccagaaattggctgggtgtggtggctcacgcctgtaatcccagcactttgggaggtcaaggtgggtggattaactgaggtcaggggtttgaaaccagcctggccaatgtgacgaaacccatctctactaaagtacagaaaatcagccaggcatggtggtgggcacttgtaatcccagctacttagggaggctgaggcatgagaatcacttgaacccgggaggcagaggttgcagtaagctgagatcgcaccactgtactccagccttggtgacagagggagacttcgtctcaaaaaaaaaaagacaaataaaaataactagaaaatccttattttttgaaattttaaaatatctttctaataacatgtggctcaaagaagaaaccacaatggaaattataacatattttcaactaaataataataaaaatacaaactattaagacttgtgggatgcaggggaatttataggttttaattcatacatttgaaaagaagactgaagatcaatgaacaaagtcatcttttttgtttcccgtttttttttttttgatacagagtcttgctctgtcgcgcaggctggagtgcagtggcacaatctcagctctctgcaacctctgccttccaggttcaagtgattctcttgcctcggcctcccatgtagctgggactacaagtgcatgccaccacacccggctaatttttgtatttttagcacagatggggttttgccatgttggccaggctggtctcgaactcctgacctcgggtgatccacccaccttggcctcccaaagtgctgggattacaggcatgagccaccatgcctgttgaacaaagtcatcttaagaaattagaaaatgaataacaaataaaacaaaggaaataataatgatagaagtgtaattaaatagagtagacataccatacaaagaaccaaaaaagctcaaaattggtattttcagaagactaataaattaatatacccatggcaggactgataaagaacaaggagagaaatgatacgtattttcaataattaaaatgggaatattattagagatcctacaaatactaaaattttatgaacaattttatgttattaactttgaaaatttagatgaaatggacaaattgacacagaaagaaatagaaatcctgaatattccttttttgtttgtttgttttttccttttgagatggagtttcactcttgttgcccaggctggagtgcaatggcatgatcttggctcactgcaacctccacctcctgggttcaagtgattctcctgcctcagcctcctgagtagctgggattacaggcatgtgccaccatgcctggctaattttttgtatttttagtagagacagggtttcaccatgttagccaggatggtctcgatctcccgacctcaggtgatccacctgcctcagcctcccaaagttctgggattacaggtgtgagccatggcgcccggccctgaatatttctttattaaagaatttgaatctataatttaaagtcttccagtaagaatgctccagacccaggtggctttataagcaaatgcatacaggtatcaaaagaagaaataatggcattcatacacaaactaaaaattggaaaagaggaagtacatgacaacttattttatgagatctccataaccttgatattaaaatctgacaagaggccgggcacagtggctcacacctgtaatcctagcctttgggaggctgaggttggcagatcatttgagttcaggagctcgagaccagcctgggcaatctggtgaaaccctgttctccacaaaaaaaaagttggccgggcatggtggcgttcaccggtagtctcagctacttggggggagctgatgtgggaagatcacttgagcccagaaggttgaggctgcagtacacaagatcttaccactgtactccagcctgggtgacaaagtgagaccctgtctaaaaaaaaaattaacaagaaagaaaaatttcaggtgaatcttcctcatgaacatagattcaaaatcctaaacatattattagcacaccaaatttagccatttatgaaaaggataatgcataaaaactttatttggtttattccagaaaaagaaatttggcttaaaattaaaaataaatatgtcaatgcatttacaaaatgaaggaataaaatcatttgatcatttcagtagatgacaaaattcaatattcattcatgataaaaaaaaaaaaagtttagaaaactaggatggagactgggcgcagtggctcacacctgtaaccctagcacttcgggaggctgaggcaggtggatcacgagctcaggagtttgagaccagcctgcccaacatggtgaaaccccatcactaccagaaatacaaaaattacccaggcgtggtggcgtgcgcctataatcccagctacttgggaggctgaggcgggagaatcgtttgaacccaggaggtggaggttgcagtgagctgagattgtgccactgcactccagcctgggtgacagagtaagacaccctcgagaggagaggagaggcgagatgaggggaggggaggggaggggagcagagggaaactaggatggaaaggaactgccttaatctaattaaataggcctacaaaattccttcagcaaatatcatccctaatggtaaaagctttccctctgtaataaaaatcaagacctggtatccactttactcaatgtcatattggaggtcctaagtgcagtgtccctcactttataggcatgctgcatatgcagttggcatcagcgaagcaggtccaccaaaactttattttgaaatgatttgatatctaaacaaaatgtaaaaacatcaaatttaatgcaatattgcaataattccctaaccactctcctccaaccactttctcttcatagagccaaacttttaaaaaatataagtcagattattgatgaagagacccaggacctggtcatgagctaccagatttgcctgcctctccatcccatcttatgtctcccttcctgttgtctgcattctggcttcaccagcattttcagagtctcaaaggtgtcatgcaacttccacatctaggcctttggaaaaagccctttcctaagcctgggaccatttccaatgccctcttcacctaattcatcctttagattttagctcgctagttcagggacaacctaatcacaaatagggaatagcctcagtcacaataaacacatctaacacccagaacttgctttctaatatgatttttcaacaaagaggaaccaaggctccttggagaaatggttgattctaggactggagcagaaaatatacaagatgagcctgcagcatcttacaatgccagaaagtaaggaagtgatcaaaatatacaccgcctcatgatgagagtatgtcaaagatgcacagaagtcaactgaaagagctcccggtggccaaagctagagaatctgatcaaggaaataaataatgcattatggattataatccagggtataaaataatccatgagtctcaattgatataaaaaatgaataaattaataagtgggggagaagagagaaatctcctatgcagaagaattgtagatactttttgtagacactctgccctcgaggggaaacataatcctcatttcttaagtgtgggctgctcaaagtgactcccttccaaacactacagtatggaaagggacaggggctgggagtggagaacagtaagttttcagtgcagaaatctgacaagcactgtatttgctaggtgatcaaggtcaacatcagcagtgaagtcatgttgatcgtaggtatccttgatacaatgtgatgagaatggcattttacctctgtggtcttcctcccccaaacacaaaagcccagtcaaatcatatcatgagacaaatatcagacaaattccagttgaggacattctgcaaacgtttcacaaaatgtactcttcaaaactgtcaaggtcatcaaaaacaagaaaagcctaagaaactgccatagccaagagaagcgtaaggagacaggagaactattaatagaggtaatgcggcgtcacagatgggatcccggggcagaaaaaagaaaattaggtaaaaactagggaaatctgaataaagcgtgtattttagttaataatactgtatcaatattggttcactaattgtgccatgtatacctgactaaatgtaatggggaaaactgggtatgggaactctctactatatatgcaatttttctataaatctaaatctgttaaaatctaaatctgtatgaaaaacatcaacaactaaataacctctaaatagtgaatagaatatggtatccctcctacttctcataaattatttaaaagtctgccaagtattggtctgaatacggaaatcatattttgcttaagctggggagtgggtacataggccttgttgtatttttctttatgcctttttgcatatctagtatttcattttttaaaatgctaaatgtaaagcaattgcgtaaaagtcaaaatgttgatctctcgcatgatggctacttagttttaaaatatcaaattatttgaaaataatttttcaatgattctgctttgctggtacccaagcatgtccagtgtgcccacggggtgctgggcactgtctctggggaagcagcaaaccagactcatctctaggtggcctgggctcaacagcttcctgccattttctttgattggtagttaagacttttttgttgttgttttgtttttgtttttgttttttgagacggagtctcgctctgttgcccaggctggagtgcagtggcgcgatctcggctcactgcaagctccgcctccagggttcacgccattctcctgcctcagcctcccaagtagcggggactacaggcgaccgccaccacgcccggctaatttgtgtgtgtgtgtgtgtgtgtgtgtgtgtgtgtgtgtgtgtgtgtatttttagaagagatggggtttcaccatgttagccaggatatggtctcaatctcttgacctcgtgatccaccagccttggccttccaaagtgctgggattacaggcgtgagccatggcgccgggccaacattttttttttcctgacaacttaatgtctatctatcctaatagattgccagctacgtgagagcagggatgattgtatgtacattgagtagcaaggtgcctggcatacaataaatggtcaataagtatttattgagtgactataacttaatgattcaaaacttagaccctagtgttacctggacctgatgaagtttagcttccccacttactaggaatggggtcaataaaaatgcccactccaaaggcgctttgtggacgaatgtgcttacttattacggttctttgtaaatgttagctatgatttttattaggtgcttgctgaattaaatagcttaatatttgtaaagtgcttagaacagttcctggaacagggtaagtgcttcttgtttgtgtttatttattatttttttaatgttgctgttgaccaaattaaacttcacattcattttgtttagtctgttagggatattctttggaaaatcttctacattgtgtggaaagataaggcctaaaatgcatactattctgattcgttcaaaatatatcactctgggatatgtgtaattcagaaaggaacgtgatctgaacacttctgtagtagttatggagaagtaatgtgtactacaaaaaaggaatcattaaatcatttaagaaaattgctgtgcactacagcaatatcattcatagataattaacaatccacctttgcaggggtttgttacctggtttcaaaacattggcttttaaacttcttgccctagctcaaaatgtaagaaatacattttacattatgacttagtacacaataatatatgtgcgtgcatatataagcatatatatacatgcctaaatatttgtgtatatgtataatggaaacaaaattttactacacaatggtcattcctagtaaagtgatggatgctctctaatactgtttctagttccagtaggtgagagggtaagagaatttgcacttttttttttggcgggggggatggagtcttgctctgccatccaggctggagtgcagtggtgctatctcgggtccttgcaacctctgcctcccgggttcaagtgatcctcttgcctcagcctcccgagtggctgggattacaagcacatgccaccacacccggctaatttttgtatttttagtggagatggggtttcaccatgttggccaggctggtctggaactcctgagctcaggtgatccacctgccttggcctcctaaagttttgggattacaggcgtcagccaccacgtccagctgagtgtttgcactttgaacaagtcccaaggtgatgccgttgctgctagtttggggaaccacactttgagaacttctacactagacaatactagtgattgaaaaaaaatcaagccccactaagcgcctccaagtgctggtctggccccaatcttccaactcatttacactttgctttagattcaacatccacctgctcctgggataattctgggttcccccacttctggtgggtcttgtgtttctattttccttaccagtcaaaatgtccacactcatctcttgcctagttgttctctctctctctttctctctctgtctagaaatggaaaggtaaagacgatactgggatggtctgacttgagagacaaatgcaattaatcatcacaataattcaagggaaagttaaacagtacttgctgtttttttccagggatccaaaatgagttagttactgccttggcataaagtcaaccaaaattatgggaatacctgtgcctatttcctctttatgatttttggtctttttgctttccaaaaatggggtaatgtataaaattatcaatgaaaaacttccttgctcttgctcattactttaatcaaaaaaagttcaacaagtacatattacaaggattctcttggtagaacaccattagctaaatagaaaaaggaaccgtacttaaacactaaatctagttgaaaaagcaaatgatccttaattgtagattgatgagctccggccagtgatggtatcacagcctaagatgaaattggtgaaatcaaatgttaagaggtctcagaattggcatcacgagggcaaagagatgaaacaactagtgatatctggccaaggagcagcagtgtggcagctggctactggcttctatatgaaagagagaaatggtacctacctgggaccaacatggagggcggcagggagaggctgcccctcgaaatggggaaactgactgtttgggcagggaaggcaacagtgactgaaaaaaggaatcagctgttattggttgaccagaaaaaggtactggtatccactctaagcttttagggaaggaagaactggttggctcccagttcagacaaggcccctaacatctgaattaatcttataaatggttctgtatgcttctttcttttgggtctcaggtttaaaatgttctttcttttgagtgggtgattgagatggaaattccaccaagttttctggagtagatactctatgacaagaacggcatttaatttcccttcagccactgtgggtttaaaaccaacaaacttaggtcgcatcttcataaaaatcacaattaaattttgggttatggaggaggtaaccaggatagaatatgctttgggggtacaaaactgttgaagggaatcattatcagtagcttttcacagctacccaaccataaaacgcctttggctctgagaatagtagtagctagattttggcttcttttgtttttttctgtcccatcccccatctccccttggatgcctttggattcaaatgtagatgaaatgcagattcttgggagaaaggaagacatgcctggtttggctggtgattgggaaaagaggaggatctcagatttcaggttttagttatcattctcccgagatgggaagaggctgtgattcttgatctgaagagtcttatcgtcggtagaacttgccatcgatgatcaattgtttggatttgaggaggagagaattgaattatgttggcctacaacaacgggagcaggtcaggtaagaatcgtttattgctggtagacgtgtcttttaatcatgtgtgtatatcgtctctcttgttgaccacttctctaatcttttaagagtcatatgtcttactagtgcatggtattgtgctgtatgtatttttgctgcaatcttcccggtgtgcttaggggatgtgatttcacttttattcttaagccactgagaaaataatagcacccacacacgtggtcatggaaactacagaacttcactgtttcataaaaggtggtggaaattccaagtcattaaataatcttgggcatatttacttctgctatgagtgctggtaaaatgtttatataaaaaagtgacggaggaaagcaaagtttgcttaaaagtaagacaaattgaacgaatgaggttaaaatatatatgtatatataagcaaaatagcattccataaatcagtgagttttaaatggagggcagatgaaaggaacaaagtggacaattgagaacttcctcaatttctcagtcgctaggtggatacccatctccttcgccagtggaagccaactgtcagagtggagaggtggttggaacttaggagtatggctcactcctgctttgttttagaggctactggtggttactcttaatgttgtagactaaggatagcagcataaacattccagattgtcaagattgaaaagctacgtaaattgacaaaggtctatgtaaattgacatttttgagttgcctttttgaggctataattcttcccctttttgtttccacaatggggaaaatcgccttactagctcaatatctggatatgtttgttgtggatgtctatgttcctttctttccctctcctgggcaacaatggcagttttggagactccttggagaccacagtaccattacgcacatggtggagccccttgtgaatgcctaagcttgtggatgttctgaagggggcaataattggagtaatggtcatggcgagaagtgcttgtatttgtattggtccatcattgcataataggcttatatgttatatgtatctatttcctattgaggatctcttttttacagttgatttttcttgagggattttaaactatcacctgccagtatttgagcgcttgccgaagtgtgcactcaatgctttgagatttcccaaatgtataaaatcctagtccttgccttcaaggaacttacaacttttgttgataaattggtaaacctagagagaaggcaacaatgaaatgcagcatataatggaaatgctaagtgagaggaaagaggcgctgtttggaggagggagagggaattggctgggccatcagggaaagaggcagagcttgaggcgccttgaccagttgatgaagtggtggctttaatttgcgattcttgtgcaaacatttgataatgggaattggatgtgtaggtattgggctttctcgtggacactgaaattccattcattgaacaacaccttatttcctgtatagagaatggtgctaggggccagcgtcaaatttgaagatgaagtctgactgaaggtcatcgtttggagttggggtggggtgaagagtagacaaaccttaaaatacagagacgagtgctgcagtgagcacgcgtgagtgcttaggcagcgcttgaagagggagttaccgatttggccctggaagtcaggaaggctatccttttaaggtgatccctgagctgggagtttgtttcaaacggtggggaccgcaggtagaagcaccgcttaaggggaacggcgattcgactcgcagtgacttaagggttggcgtggtgcttgttcctgggcgtggggaggacaggaaaccgcggggtctgtgagacgccccgtggttgttgaaacgctgttggggggcacaaacgaatagggctttaggaagaaaactggtgggaggagccttgtggctccaaggtaggttaggaactggagcgagatggagcacggaggagtgaggcggcccgaaggatgcccggggagacatggaggaactggcgagggcttcccgatgcagggcctgggggagagggtgaactaatgcctctgcagtgccccgtggggaagttccgcatactcggccagagtgatcggagttggcggctgtctgggggagttgggtcaggaagccccttctttcgccaccgatggggcacgtccagggcccggcaggtgtgccctggcagtagatcttccctgggaagtggagcgcgggccagccctcgctgttctgagcgagggcctgtcgtgtagtccacaccgttccgcgaaaggaaccaccattgacagcctcgttcgattagaacccggacctccctggaatccagactcggtcccttcccagctgcgcttcggaggaggcggacgctccgagaggaacccagaggcctggcgtggggggagctgcgggcagagcggaggcagccgcgccctcgcgccgccctccgccgcgcccggctcccgccccccggatcccacccccggcctgccgcggagccagcgtgccagccggagctcgccgggccaccccgcggggcgcgcggcccgggctccgggtcttggcggcggccggtggggcgggcatggggtggggtgggtgctccacctggccacgccgccggcccttcgcgggctggcccggccccggacgggcgggcgcacggaggccgcctcttgggctcctcctggagggaggcgcgcggtagacggcgcggccgctgccgtcggggcggtgggctccagacgcgggccggctcgctcgcatggttccctgccccatctcgggtccgtcgctgcccgtcctggtgtgcacaaccgcgctgcgcctcgaacctcgaggtccaggtcccgcctgccctgggccgggccgcaagcgcccacgtcgaggcgggctggggggcggtgccgcgggccaggccgaccccgcaagcgggactggggaagtcggagccccgcccaccaccccgccccccgcgctcgcggccccgcccccgactgccccgctcctccccttcctgccggctcgctcccggccccgccggccgcccgcctcggccccgagcggagcccactgctcccctcggctgccccgccccgccgccgccccgcccctcccgcgcgggcggcccgaaaacccggagcgcgggagcgcggctccgcagggccgggcggccgcactgggcatgctcagtagccggggcaggttttttggtcgcaagtaggaagctttctgcactacaccggagaggggagccgcgatccggccgcgccgcccgcacgccgccgcgcccgccccagcccgcccggccccgcggcggggcgcgatgagcccgagcgcgagccggcccgccggggagtgagcgcggggcgcccagggcgcgttgcgtagctgctcctgcgcacaaccccgccgcgccgccggcccgcactggccgcggagtgcaagaggctcgtccgtgcccagcgcccggccggccgcgggagcaggaagcgcaggccacgcaggacccaactgaaacaaagtgtcggccgcccggcgccggcgcccgccccgaccctgcccctcccgcccgcaactccgccgcccaccatggcttccgaggagctgtacgaggtacctcccctccccccggcctcgggccgccccccgcccgccgcccctcccggcccggccgcgccgcccgacggccccgctcgccgcccgcgcccgccgcgtcccctcccccgccgcggccgcagtttgctggacgggaaatgtgtgtgaggggagcccgagcctccgttccgaggggccccggccggggggtcctgaagttgccgggcgtggggtgggggggggggtcccagccgtggggaagtggtgctgacacaagtgacttgctcggactgagctcaaagtgctcttggcgtgggtcgtggaagtggtgcctccgttgccgctcggcggggaccgtgggcggtacggggggtggggtgtgggggggtttctggatcatttgataaagcatttgggagagggttttgcccctggtcggggggtggcggggagaagaccggtgcaaacgctttcgactttgctgttcgccaaagcgatgcaaaatctcgcaccgaaaatgctaaacgttgaccacatgctttaattaggttagcattgtggccagagccaggaaatttaaatttaacgctgatacaccgtcattcatttgcgccgcagcgttgcaaatgagaagggcatagccagaactgtaagttctggtcgatgggtttaaaccagcttcaagtttgagagttaccaatttggatctttagacatgttttgtatgtctccatgtaacttcttttgacgtatttcaaagtagacttcctgggagtacagaagtttggaaggctttctgttcttctggataaatgattctcttgtttcacatgtatttataaataagttcctaagagacttaaaacttgcgaagactctctagactcacctttatgatgcgtttagggacctgggtgttgagggacttaaggaagcatctgtaacaagtagagccctgtggccccagggatcctttcagttgtcttctcttatgggcgtattattgctgttggcatagaatagagctttgttgtctgcgatgttagtcttctagcaacttttttgttgctttttaagagcaagtgtttgcagaagttctcaggaggaagctgccatctgtagaattaagggtaaggttgttgcttctccttacattgtatgtggtcagtataccttagctggtactgaaaatgttccattcttttcaaccattttacacattagctgtgccccgctgtattcaggatactattttaggtcatttggggatgtaaaagaagaaaaatctccctgttctcaggagctttccttctaggaaggaaagtgttgtgtgtctggaagacacagaaatggaggctaggatgtttgaggttgaggtcttccaggtgaagtctgtacagggggaagtacatagcatgagggtatgggggattttagtttctacattagatcattctttggttgtttagtcatgagtgttcactcttggcatttgcttttatgagtatgattacataatcagttccatcagtggatgagagtagcaccttatacgtaagttgtatcctatgtgtgtaagaatgattctgaagacagcacatttcccattagtatattatgaactaagtttagttccttctgtgcttattctatatcttcaggtttctgttcctaacagaagttattaatgagtaacattttgtactaagtttgtgttcatttaacgtttattgaatgcttgccatatggaggtttcatggggaaatactgaggtgtgagaatggttcatgctttcaaggagtgtctgttggggaggaagtaagtatattgcaaataaatgatacacctgcacaattgaacttttgattctgagttttattttagttttggaaaaaaaggtattatagaagtatagttcaggtgataaatttaagtatgtgtagtaaatatgtagtggtcagtatctttcaaggcaaaatttgtaacttttcttttacttgtaggcaacactgtgactatgttaccattgaaagttgacattgaaagttttgcatggcagttgagagcctagatttggagtcagacaacccagttagtgacttccaactctatcaccttgggtaaattagccttgaaagctcagtttcctcatctgtgaaattgggatcagtgtttcccttatagagctatgaagtttacatgagaacatatgtaaagcccaccctaaaattcccatggcaagcacccagtaagtgatgatgattgtatggtaactggcttaaaatgcctccctgaaacctggttttgtttctaaaggtatagagttgtattgttttcataaaggcagtattatctgtagggcagaagtgatacgcaattgtaaatgaacgcgatagtctgacaaggctgggaaagacactaagatgatgttttgtggccaagtcaagggttgttagttgccttgttttgtccagttctgcctaaactgaaatagaagttttctgtttggcctcaggctccacaaatctagagggatatattgacaggaggaaatgtgaagtcttgcttctttgaactcacatggtctggtaggaggacaggtctgcagtaactgggaacttgggtgagttacccaactgctgagccttggttttctcgcctaaaagaaatgtctccaatacttagcatggaacctggtatgtagtaataggtctttagtaaatgtttaaatggctattgaaactaggctttgtgaacaaaaaataaaggaacagatcctggaaaagatgggtagagcatgaaccttgcaaaatttgaagagttactattagttgaaggatggaatagatttactccctacttttccagctgctaggattgaggaaaaacggatttttgatgcggcgtaggttagaacttcatagttttcacaaaaagacaagcgtcctttacatcacgcttctaatgtaaagggccagataatacatattttagacttgtgggttatattatggtctttgttgcaaccactcagctcacctcatgtagtgcaaaagcagtcgtagactcctatatgaatgtgcgctgtgtctcaaactgcttatggatagtaaaattcacttagtatatttcatatcattttatgtgtcatgaaatacacatttgtgttttttttccaatcacttacaaatgtaaaaatgattcctaacttgtaggttccacaaaaataggcagtgggctggctttgccctgtaggttgttgtttgttaagccctgctgtaggtgatcaactgtcatagtctgtttaggaatctgggtttactcaagggttggggatgtatggaagttagacggtatttctaactttcatcccagctctagacttagagctggaagatctgggtggtaatcctccctcctttcctccttcctttcctttctttctttctctttttttttttcaagagtcttgctctatctcccaggctgatgtgcagtggcttcatgttgtcagctcactacaacctctgcctcccgggttcaaagctattctcatgcctcagcctcctgagtggctgggattacagacgtgcaccacccccgcctacgcccccccccccccgcccccgcccccgccccggctaatgttttgtatttttagtagagacagggtttcaccttgtgggccaggctggtctcaaactcctggtctcaagtgatccgcccaccttggcctcccaaagtgctgggattacaggcatgagtcactgcacccggccttcccttgttcttagaagcttgttaagtaactcatcttgtacttgtcttaactatcctaaactttctcatcagtaaaataggaggatgataaccaaataattgaggcttaaatggcattagcgtgtaaaagcaattctacaaaacgttttccatttttaaagaggaaaaaaaacccatccaactctcaaaccatgaaaccaaacctgttttcccttcctcaagatttaggatttgaaagtattctataaactgattatatcaccagagaaagctgtgaggtcaagaggaccttaatttatttagcagtcaagtaaccaccatgagactttgttcacgtgggactgaataaggaacgtatgctgtagtaaaatggaataagtattctctttatttgtatgtcttaataattccttttttcctcagtagatgtggagttattcccttgagaactcctgtaatagttaattcaaatttcagtaagctctcaatgattagtcttgaccttctgagagaatatttatgttttcattttcaaaaatggaagtaagcttttaagaatgaaatcgtatctggtgtgtaaaaaattgttttaaagttgattagtttgacaggatgatcaggatttgcaggggaaggtaggtcttttgaatctttcttcctactttgcgataagattcctgctctctcctgtgcaccacaaggcttttacttacattgaccaaaagcagttgtgaataaagtctcaatctgtagttcaaatggaagtcacagagaccaggacacctttcatggatgttggccaagctaggtcagcgtatgttgtatatggtgtagctgtctgaaaagattggaatcaccaaaattagtaaagaaaaagagttcatttgacttcaggagttgatagtgaggcagtgaggtcaaacatgcatgtgtgttttgacaataatagcctatcttaaatgctctttttcctgtgagttgctgagaatattatttattcatttgccccagcagcagtgtggagacctctcatgtgctcttcctttgaactactttcaattcctgtgtaccagaatagcgtttttttcattcttgctgtgatatctaagaatcatagactgttccctcgtgctctataatgattttaaccacggagaatattttcatggtatgtaggcaacactttcttcgcattgttctggttcacagttttggataactgtgattcacaaagccaggcctcaaatgaattcttttgtaaataaggagtgatagtttttatattgtgagcactcctaggtggaacaggaccagcctggggtcttttttcaattcagattcttgaacccaaaccacgagattataattttcaatgtttggatggagacaggaatcttatgttccgagaagcttctttttggaatgcaggtggatttaggagcctctggatacgcccttctgtgtttcagacccttaggctctgcgtggaggtgggtgggggtgggttggggatctgcctggcggaagaggagctctcggtggaccagactggttctttctgcaggctccttgaccactgctggttgttaactgagtaattccaggaagggaatattaaaaacatcaggtagttagctaagggcgttgtaatttctgttttctgtctttattgcctggcatgtttgtccaccagaatgtaagtgctttaaagctcagattcattttctggtcattattttccacagctcaaaatactgcaatcgttgcataattgttgagttactttaatggaagagtgaattacaggaatgaatctccattcctgactccttacttacctcgaggttcctcctcccctaagcattatgcctcttgctgttctttttactcttagttcctcatctgcttacatggtttcaactctagaatggagaatttcactgtttcccacacaaacttaattctcttcagccttttaagctgggcaaggttttggggttcacgttctctaggaagtctggggagggcctattatgagtctagatatgactttaaatccaattataacctcaaatagaattttatgaaaatttaaacaagtacatatgagcatatttcagagggagagaatcaagagctttcatctgattctcagagggatataggacccaaagcaagtattaaaaactgcatcgagacctttgaactaagacttatctgtggctgccctccacggaccactttgacattatttttgttgaactgtcctctgccacaaattacagtaaaaccatattaaaacctcactgattgggtttagaagttgtatgctatttctagtctttaagtggctaattttgcagctatgcatacatgatgtctaaagatagtcagtatttaatggcacttctgacaatgtaaagattttacattccttgaaccctggtgcattcctgaactcacatgctactgctttcttattgcccatgaaaaaatccctcatcaaatagaacattattattttatacaacctttctttagattcacctctgacttcatagtttcttcaatcagatcgtccatcttctatctcagaacttccttctgggatttttttttttcttaagtgtatcctttagagatttctttagtgagggactatggatggaaaagtttctaggttttttttttttaattattattatctggacatgtctttattttgccatcattttttgaaagagaatagtatttcaaataaaaccagttaattggttaatttctttcagctccttctgaagatggtgctccattgtcttctgccttgcctttgcactattcttgagacttttttttttttttttgaggtggcgtttcactcttgtcgcccaggctggagtgcagtggcatgatcttggcttactgtagcctctgcctcactggttcaagtgattctcctgcctcagcctttcaagtagctgggattatgggcatgcaccaccatgcctggctattttttgtatttttagtagagatggggtttcaccatgttggtcaggctagtctcgaactcctgacatcaagtgatccacccgcctcagcctcccagagtgcttggattacaggtgtgagccacactgcacctggccaagactgttgtcagcataggtgcagtcactttataggagatctgtcttctgtctctggttgttcttgagatcatctctttgactttggtttcctcttgtttaatacgacaatgtattttgtgtgattttttattagttaggtgggtatatgttgtgctgctttttggatttgtgcctcatcagctcgaaaatggatttggccagtttgtcttcaaatactccttctctgtactcgtcaggaattccaagtagacatctatcagatcatttcattctctcttctttgtcttttaccttttcatttccatctccttgtttgtgttttgttttctttttatgtgctgcattttagctatttccttggatctaaactatagttcactaatgagctgtgtttaatctgctgttttattcaaccattgagttttaattttcaataattacattttttacttcgaaatattctggggagtttttacctaatctgcaattcgttttttaagtctttggtgtttgtccattttatgatttagtcattattttgggttgggggcagttactgaggcagctgggatattttccttgtttcctacaattgctatatggtatcactgttaatgagagttatattttattaaagatctagttaatttgtaatgagagggccctttggagtcatgtttgctttattgccagaatctgaagaaaccttcttgatttggaatttgtgacatgagcagggattgaggctttgaaccaacacttgagatttacctgatgatattgaaaatgcaaaacagtagttttcaagaggactgtttatgaaaatggattataatagttataacgcaattgcttctgaagcaaaatgttcaatgtctttgttcggcatgccttgatatatagtcttgtaccacataatgatactttggtcttacgatggtggtcccgtaagattataataccacatttttactgtaccttttctatgtttagatacacaagttgatatggtttggctgtgtcctcacccagatctcatttggaattgtagctcccataattcccacgtaccatgggagggaccctgtgggaggtagttgaatcgtggggtggatctttcccttgctgttctcctgatagtgagtctcatgagatctcatggtttgataaaaaggagttcccctgcacaagctctcttgcctgccaccatgtaacgtgtgaccttgctcctcattcaccttcctccatgattgtgaggcccccccagccatgtggaactgagttaattaaactcgtttcctttataaattacccggtctcgggtatgtctttattagcaatgtgagaatggactaatacacaagtcctcactattgtgttaaaattgcctacagtgttcagtacagtaacatctgtacaggtctgtagcctggaagcaataggctctaccatacagcctaggtgtgtagtaggctacaacattgatgtttgtgtaagttcactctgtgaggttcgcacagcagtgaaattgcctaacaacgcatttctgagaacatatcactgtagttaagcaacgtgtgaccgtatagtatactttcttttttgtggagaggttagcttcaatatatctagagaatgtcttttatttactttttgtcttatttccatttgtagtaggctctctgctatgtgaagttttctttgttggtagcttcctagtgtttgttgttaaaacccaacaatgttgactgcacatcatgaatgttctttggttaaaatgtatccgtttttcacttgtacccatttttcattagtagtttactgtttaggaattcaaggcatcacatagttgcacacagaagcttttcttattttattaatagcatgtaactaatgtggatatcccagctctttagtgtatctcagaaccaggacaaaaaaagtcatcttagtttgcaaaaagatgcaccaccccatgcacactggacaacagctctgggtctctcttggagactgttgacatttcctttaggcattatgtacttggacttgactggcacctttagcatgttagaaacaggttatttggtaaaggaaaaggctctgccagaggcaggtgaattgacgttaataagtttgttcatgaagttcgctgaagagggtagctggtgatggcactccaagtcttgaggtgacaggctccgtggggccagtcctgcgccccttagagcaagtgaagggcatgcttatgaaagaaaaggcatatgttgcaaagagctatcaagaagagtttttaaaaagtgttgctatgtaagtgtaagcgaaaaaattaagtctacttttatggtaaacttaaacataaattttatggtcatttccacccaagttctccagacggcagaggagtcagcaggaattctcctaaggaggtggaggtgggagggaggaggaaatggcctttgcaagcctgacctgttgtttgaaatctcaagttaccttacatgttttatgatattaaccatgtagtccatacaatttttgggattcaatatgaaatattttaaacatatttaccaaggagctcttctccagagatccttgatttaggctgatgtttcaggaagctgagctgtggattagtggccctgtgtgcccttggtctcttgctgtgtgtgtgtactctggcttcagaagcagagacggactgtgttaccttccataatgatgccgggtaaaggaggcattagctgatctggtgaaatgtaaataagatttgaattaagtagttcaaaaaaaatttaaaaagtttgttttagtaattgtttttaaccaataaagattaaaaatacttgttttctgtctgcagtcatcttactgctaggggttcaagagaaggtgcactagtagtttttatctcgagtctcgctgtttattctctgtactttaaaaaagtgactgtgctgttgccttgagctggttgtgggagcatttgtagggtccctgttggaatgaggaccaatctgcttcataactcctctctgtctatgggctagaccaaagtacccttggagaactccatgtcttccaggaagtttccaccctttttctcctccctctttcctgagtgttattgtctgcatgtccagctgtgtccctctaacctgattttcagccatctgccaggtccctcgagttgaggcttcactcctcctgtcctgattcttgaccctggcttctgcacttgctggtggccctgcagagctctggcctgggaagtagaagaatggctgcccacttgtgtttgtgttacctggcttttcatctgcacagtccagagggaagttctcaactgtcttacaccccaggcacgtgaggtagagtgtagccaactctcccagcaggacagacttctgggattcttagtcctctaacttctctctcatatgcagatgagcttttgaacttaaagcaagaggcgagtgattattttattagcacctttagggatgcaaagaagtaggagtgtgtgtttgagggaggtgctaactagactgattcgttgtgcccttccttcagagtgcacctagacgagtcagagtcagagtttccccagaatcatttggcacgccatcctgcgacaccactggtttctgctcgtaaatgagctttttgaaaaaatcttgattcggttgatagatacatatctaaatgtgcattcctcagtccttcctaagtagctctagattggggctgcttaaaaatgaagaggctgcagtgactgtatagagtatgttgaaaagatcatggaaatgaggtcctgtggaagtgcgtgctcataccttggcagaagttcagtgctgagaccagacacattcagcttgcccaggaacctaacgaaagtcaacagaaaagaaatcgtgggtctgagctgggcagcttcatggcaacgctgccccctcacctttgacagaaaggcagctgggagagaaggagaccaaagacatgcaggtggaggtgcggacaggctgctctgaaattcaagtctttttttttttttttttttttttgggagacagagtctcgctctgttgcccaggctggagggcaatggcacgatctcggctcactgcaacctctgcctcccagttcaagtaattctcctgcctctgcctctccagtggctgggactacaggtgtgcgccaccacgcctggctaatttttgtatttttagtagagacaaggattcaccattttggccaggctggtctcgaactcctgacctcaactgatctgcccaccttggccttgcaaagtgctgggattataggtgtgagccaccgcacctggtcgaaattcgagtcttatagtcataattccactgaaaggaaaggtcagggtccttcttttgggtctccagtggctcacttctgtagcaggaaagggacatgacttggggtttggtgaactgtttaaaaaggcttttcaggctgggtgtagtggctggcgcctgtaatcccagaacttcgggaggccaaggcaggaggatcacttgaggccaggagttcaagaccagcctggccaatatggtaaaaccgcgtttctgctaaacaaaaatttagccaagtgtggtggtgcctgtagtcacaagtactcgggaggctgaggcaggagaatcacttgaacccaggaggtggagttagcagtgagccgagatcacctcactgcactccagcctgggtgacagagtgagactctgtcaaaaaaaaaaaaaaaaaaaaaaggcttttcagtagtggagcaggtctctgtgaagaaaagtgcttcccttagagtttgaaaaggaacccttggggcaaataaggacgtccctaggccctgaaggtgggtcaggaactctcaaagattgaaacaccacccctcccccaccatattcctgagccctcactctcctgggtcactggggtgggaactgtaaggatggaaattccaatcctttctgtgcttccccaccaccattcggcagcagaagtgtgtaattcatatctagtgtgacccgtgtttctccggaatttgtggtctgcctgtcgaacagccagcccccttcccaccccacctgttaggatccccgcaggctttgctctgctgttctgggatgaaggatgttgctgcttcctccattgtgccaggtggaccagcctctggccctgtccctcaaggtgaagctatgtgagttagagccctccctgtcttgtagctacatggcgggccaggtgctgctcctcctggctttacattctgtcccgggaatagccaagccatactgcttcatgcagaagctcctggttttcgtgttttttgtttgtttgtttttgagacagggtcttgctctgttgcccaggctggagtgcaggggcatgatctctgctcactgcagcctctgtctcctgggctcaggtgatctgcctacttcagcctgccgagtagctggaaccatgggtgtgcaccaccgtgcctggctaatttttgtatttttagtagatacggggtttcgccatgttggccaggctggtctcgagctcctgggctcaagcaatctgctccttagcctcccaaggtgctgagattgcagacgtgacctgccgcgcctggctgctcctgggtttcagttgcgcttctctcccctagtggtgtctctgggcacggtgggccctccgcaccacatctgtcttgctgggccggttttatttctgtttccctggccctggcagcctccccgccctaggcatctcccccactcccagtgggcaggaactccagtgattcaaacttaaatggctgctacccagtacagtccttgaggagctctgcagtgctctgtgagcttttgaggggccatgtgcatcagaaagcacctgccactaaaaattgttgtagaatcagttatctgaactctgggttcagcgttgttcccaaatgactttgctctgtttccctagctctcctgcctttggccctatctggctctttcccacctactctgggtgttactcttctcacctgcccctgggtagggcccccgcagcactccatggagtaatggggagttgaaccattcagagaagtgtagtttcctgttcttaatgaaagacatcaggtgaacaataaaatcctcctgttcctctaaaacaaatcgcctttcagacgacagaaagctgccctttatgcctttgtgctcccccttccctgtgggttatttgtccttgctggagaatgggttttctctcctgctgtacatcattgaggacatcatcctgtcagggttttgctaggctggtgttgtgtggatattgataatgataaaaagcaacaagcatataggaagatttgctgttctcctcagttatctcttttggatatatgctgtattagcaagaagctatttactctttcagtaagtgtttgttaagggtggtggtatttgaaagccttgagtttataaagtactaatgaaaccttttaaatacgaagacagctttttacttaacaaatgtatagtgagcagttaacaatgggacttaatactatgtgtaagtgaccttttgcatgctgtataaaagcttgtcagagttcaggaggtgttactgctgtggttttgggtttgcttgagaacattagatgttatttttctccaagacacatactagtgaccttaacaacaacaaactcatttttcttggtatgaggactagagttaggagaatttctgaagcgcttttggaaagtaggcggacatttgagttcctcatctgccttttcccctggtcatcatacatgggatcattaagcagaacacagagcagacttgactaaagcaatgacattttgtaatgtagcttatggaagtagaataggaaggctcagctaattacctgtaatttcaaaggcagccagtaggtttcctgtgtacagcaccttggaaatcttttgtatggacccaaaaatgagtgactaattacagaatagaaaatgaataagctttgtacgaggttaagcaaatttgcaggaagaatgtatttaatgcatcatcatggaaagcaatttttgactgtcatcaacgatttcaagttaagcaagtatctgtaatgaagcacaaaagattgataaaaacagagaaaatatcagagattggatttgtccaagtaggctaactgaaaatttggtccaacaaacatcagcaagtgctcactttggaagagaatttgagtttttaaaaaattagaccccaaaggtaggtacaaactgatgatttaatatctgttattagtgtttcttagagaaacagaacgaagtgtaacgtctttggagaatacattaagggaggaagctttccaaaacccaacatgaagactcatatacagtggccagcattgacattcctaagaatcaagaaagcatcatatgatctttgtcatcaataccactgttcactgtataaccgattccataggctcagagagatgtggaaatcaggatgttttgagaatcagtgaggtggagggaacagggctgggccctagtgatgaaatttttaacgaagacctttcattttgtgtgtgagaaaccacttttgatttacaatgtatcatcaacctcactctctagacttctagtactgaagtactttagttcacgtcaaaatctgtttctcaattagggagtgaagatttggcaccatagagcatattcaaaaaactgtgttggagggcagtcctaaaagagaaaaagttctgaggatattctgtgttgtcaacagcttctttgaactgagagtttggcctctgacgtcttggcttgaactagctgacatccacttggcagacaggccctctgaatttctagcatttacatggtctcattaccttagtgtgggacgtatataatttaagggccctgtgcgtgtttactgagcaaagaaacatcaaagaaagaaaaaaaaaaagtcccatgccctaccaccctggtctaactactacgaaccacagaagaccattctggacagaagagtagatgtatacagttaacagttatttcataaacacagaatcgtatgcatggtatttagtagaagataaatataagttaataggaaggaattgtagaatttttttttttttttttgagacggagtcttgctctgttgcccaggctggagtgcagtggcgcgatctcagctcactgcaagctccacctcctgggttcacgccattctcctgcctcagcctcccgagtagctgggactacaggcgcctaccaccacgcccggctaattttttttttttttttgtatttttagtacagacggggtttcaccatgttagccaggatggtctcgatctcctgacctcgtgatccacccgcctcggcctcccaaggtgctgggattacagatgtgagccactgcatctggccaggaattgtagaattttatatgaaaacattttacatcattggatcacttttattttgccttttccttgttgatttgttggagatcttggtatataatagattctaatctttgctactatatacgttggaaatatcttctgatatatggctttgtcctttttaaaatcaataatacatttatgtttcacttgccaaattaaatctgacattttaatgtagtcaaatttttatttaaaaaaaaattttttttttttttttgagacagagtctcactctgttgcccaggctggagtgcagtggcatgatctccgctcacggtaacctccacctccctgttaaagtgattcttctgcctcagcctcctgagtaaagtagctgggactacaggcacacactaccatggccgactaatttttgtatttttagtagagacagggtttcaccatgttggccaggctggtctggaattcctatcctcaagtgatctgcccaccttggcctcccaaagtgctgggattacaggcatgagccaccgcgcctggcttctctcatttcgttttttgtttaagaaatccttcctaccccaagatcattgtctgctgtgttttcatctaaatattttgctttctacagtatgaactttcacttacctatagtttgtttttacagtgtagcctgagcttggggttcaacttatttttaaaatgtggataatccataggcactgtttagtaaatagaccatctctccccattatttgccacctctgtcatagatgtttccatccatgtgtagggcagtttcttctgttcaattggtatttgtctttcctgattcataccatgctggcttgactagcatggctttatgtaagtcttggaaactcgtccttccaggtatcttcattgtgttctttttttctggcaaatttctctcctcatggtggtgtgctcttccatctacaccctggaatcatcatgttgattacgtgagaaaccctgttgaactggggttggtactgcatcgcgttcatggattaatctgtggcactggagatatagcagcgggcatgaccgctcagccactgcccgcccaccttcaaggagcttttattctagtggtggcaacagtctagtgagaatcggagtgctagtggctggtgggggtggtgttatttttaggtgaagcaatcagggagagcttcattgatagggtaacatttgggactggggttggagtgaggccggcaggaggccagtgtctctggaaaccaagggagagaatggcggatgaggttgggggtacttgtaggacttcataaatgtgctaagaagtactttgagttttatttgtagtaagatgggaagccatgaaggaatgatgtaataaaattaaattattttaaagtttatgccagatgctatctgggcaactggagggagacttagaaggaagccgggagaccaactaggaggctggcaggataatccaggcaaaggatgatggtggtttgaaacccaggtggtgacattgggaggtagtaaggagtgattgcatttcggggatattttgaaggtattgctgagcaggatttacccatggatggatatcggatatgagggaatgagaaggaatagaagggacctggagtttttggggttgagtaactagagtggacttgccatttactgagatgggggttcatgtgtagggtgcagctttgactttattgccctggagggctggtgggtatttaggagttggattttagatgtgtcgagtttgagatcccttttagacatctagtgggagcggctgggcagctgtgaactacacaggattatagttcagggcaggagagaattttaggagttatccatgtagtacacttggttcttagagccatgagtgcatttaatcatccaggaggtaagcataagtagagaagagatgtgaagactgaatcctgggggcactgtagccgtcatcacatagagcttgcggggagataagagacacagtaaagaagactgagaagagacgtggccagaggaggaggagaaccgagagatagtggtgcactggaagaaaacctcaaggagggaacgagccccactgtgtttggtgctgctgaggactgagaattgactgttagatttggcagcgcggaggccacttggcagcagctctttcagtggagtatggagactggagtctggcatgggctcatgagagaatgggaagagaggatttagaggtggtgattatgggcgactcctcggaagggtttcatggaaagagaactgggagtgccgggcaggctccggggtttgtttgcttaaagacagaggaatgatggtagttgtgtgatgatgggaaagagctcgggaaggggagggccaggagagagagagtgcagggacagtggctggaatgatttcctgagatggccagaagggattgcatcgaagagcatggggtgcatgtcccttactcgtatctcgtctctctcagtaatgttttgttatgaaccttttgaaagttttgcataacctttcttgattgattcctagaaactagagtttttgttgttgttgttgttggtctcgttgatggaaaagcagttggttaatgccagtacatagaaaggctgtttatgtatatctgatcttatatctagcagacttgttaaactgtctttgtatttgaaaaactgtaatttcttttagatttatatgtagacaattatatcttgtgcaaatagggatagttttttttttcttttcgaactcctgcagtacctgttatttcttgtactgaattggctaggaccgtcaagtacaacgttgaatgtaagttgtaacaacaagcatttttgttttatttctaattccaaaagagtggatctgtaaaattttactattaaataaaagctgtgaatatttgttagatgctcttttttaaaaaaaaaaatctggttaaagttttattactagcttgtgaagagttttaaatcttggttattgaatatgtttctgcatttattgcagattgttgttttacccttatttttattttctgatgttgagccatccttacatttctgggataaatgtgactctgcttagtcacatgtattattttgtgtatattgctacagtttttttcctaatcattgttataattagtcacatgaaagagaaagacacaactgaatatttttttctcttctcagtttttagaatttttggaaattctgtttttttctggttttggctttacttgcctaaaaaatcatctgagcctctctgctgccttttaggatggaaggtgaactatttattttccatcgagaatttgatcttattgatttatgagtactatttcttgaatcaattatggtttaatgtcttttatattagaagattcttaggatacttaaacatctatactggctctgtgattcagcatgcctcattctttttgtaccttttctcttagaggtatttcttttctctttttttttttaaagaatcagtttttgtctcggttctttctgttgcatccttgtctttcattatttctggttctttatttccttctgcctttaggttatttggttctttttatagctcattgagttgaacattgagctcgtattgttctttcatgaacattatcctctaaatgcagcttttgctgcatcctgtaagtttaatttcatttttttcactttcagattttttttctgtttatttaaaatacattcactttttttcctgagacagagtcttgctctgttgcccaggttagagtgcggtgcagtggtgtgatctaggctcactgcaacctctgcctcccaggttcaagtgattctcctgcctcagccttctgtgtagctgggactacaggcacgcaccaccatgtaacagggtttcaccatgttggccaggctggtctcgaactcgtgacctcatgtgatccgcctgcctcggcctcacaaagtgctggcattacaggtgtgagccactgcgcctggcccacttattttttgagtaggatatttattcataggtctaaaaggccaaaaagtataaaaaatgaaaaccaaaaaatgattttagtttgatgtgagaacatttacatttctaaggtgaaaagtttttttcttgtgattttataaaatattttatattgggattagatttaaatatttgttcagggttcatatatgtacatatatgtcaaatgtattttctttatgaagtatttactatacccttcattgttttctggcccgatcttttaattaactggcacaaatgagttggtttcctaagattataggtttgccaataaatattttgtatattttgagcctaggctttagatgtatacaaattcatgatcgtttattgtattaaggtgtagtgcccatcacttaatgaatttttcccttaaaatgtgtttatgttgctgtaataactagttttggatagtatttactagttgaatctttttccttccctttttatttaaaaaagtttggttttgtttggaactctgtcttgagagcaccatataactagattttaacacttcagtagtatcttttatcagtttaatgtgtttaattttgttattactataatgtttggaattcttagtgtttgctgtttatcattcttcttggcttacttttagtgttagcaccttgttggtatgagagatttttctacatggatttgctattactttgctgtgttgaactatacagattctgtgtctgaccttgtggttgccattagtttctttgaattctgcttatctgttattttgattaaattattcaataatttctcctggaatgtgacaaggatattggcattcttcaccttttgaatgtattctctctcctatttgacatgtatctagaatttttaattcttttcagtgtaccaaaaatgaaatatgtatattactttaatttatatccatctttcttgaagacacaataaggaaattcactgattaactcttcattctaatctgtaatcttaccctccactagattaattttaactttagaaaacacatcaataatacttctaaaaatcacaggttacttaaatttcccgacatttcatttgagaacttactgttttctttattccttctcttctacgtgggctgttttttcttcctgaattacatctttttcttttcttttcatttctttttttttttttgagatatagttcacataccgtagaatttctccttttaaagtatgtagttcactggtttttagtgtattcacaaagttgtacagccgccgccaccactatctaataccagaacatttttatccttttggaaagaaactccatgcccattagctgtcaattcccatcttactctagacccctggcaaccatgaatccactttttgtgtctgtgagtttgtttatcctgtacatgtcatataaatggaaacatacattttgtgtctgacttctttcacttagcagaatgtttccaaggtttgtgttgcagaatgtatcggtgactcattcctttttgtagctgattaataccccattttgtggatacactgtgacttgtttatccattcgtcacttggtgggacatttgagttgtttctactttttgtctattatgaatatgagcattcatgtagaagttttagtatgaacatgtattttctgtgttgttgttgttgtttgagtatgatacccaggagtgaacatctttttttttcttttcttcctttttttggagacaggattttattctgttgcccaggctggaatgcagtggcgcagtcacagctcactgcagccttgatttcctggactcagatgatcctctcacctcagcctcctaggtagctaggactgtaagtgtgtgccactacacctggctaatttttgtaatttttgtagagatggagtttcaccgtgtttccctggctggtcttgaactcctgggctccagcaatctgcccaccttgacctcccaaagtgctaggattacatgcatgagccaccatgccttgccagacatcttttaataattattttagtgaggatttggggataagttcttggtattcatttgtctaaagataattgcactattgtcactagtaatgacattttagctggagataagtttattggtttaccgtttttatcagtcttagagctgatgaaaagtctcctgtcctccttttctaagttatctgagtttctgatagtttaagatttcttacctttgatagttctgtagttttattacagtgggtctaagagtagatatggtatacttttggtctcagtatgaattgatctgaagatgttaacatatcttttaataaatgtcagtgccttgaggaattgtgtctatcttcataaggtatgtcagtctataattttcttatttcacatcacagttaatgctggcctcataagaggagttaggaagcactttctctgtttctcaaattgaatgtattgtactggtttggattctttcatgaatatgtactaaaatttatcagtgaagctattggggactaagattttctttgtgataagtttttagattatgaattcacagcctttaattaaacataagctagacttaacatttctccttgggtcagtttttgtgaaagttgtatctttaaaggaatttacctcatctaaaatgttgcgttcattagcagatacttgcttctgctctttattattattacctttactttcagtttaatttgctttttctgttttggtttcttaaggtggaagtttaggccattgctgtattgtcttacatgagcatatagtgctgtacatttacttgcagctctgcttcagtctatcaaaatttgatatgctttcattagaatccagttcaaaatattttctgggttgatttgtgatttcttctttgacccctgggtttagaattaggttaaattgtggatatttgaggtttttctaaatgttttattgttgattttgaattccattgtagtcaaagcacatttcctataagatttcagttttttggaatctattcagaattgttttatggcccagtatatggtctgtcttggtgaatgttctgtgtgtatttgaaaagattatataattctctggttgttgatggagcttttcataaataccagctaaactacagttggtatggtcacataggtctcccattttttttttatttttttattttttaggcaaggtctcactcacccaggttggagtgcagtggcgtgatcatggctcagcatagcttccacttctcaggctcagatgatcctctcacctcagcctcccaagtagctgggactataggtgtgtgccaccacacccagctagtttttgtagagatggggtttcatgatatgcccaggctgatcttgaactcctgagctaggcgatctgcctgccttgctcggctcccaaagtgctgagattacagagcatgagccattgcgcccagccaagatctctcatctctttgttttattgttttttggtccaattttatcaattactgagaaatatgttagaatttccaaatacgattgtgcattggttgtttctgtttctgtttcacgtattttgaagctgtcattagatggatgtatatttataatattgttatattttccttttaaaatcactatgaaacgtcttttttgtttctagtaatacttttcgaagtctactttgttttacattaatgtatccattctagctttggtatatctttttccagtctgttacttttagtttgtttctgtctttatatttaaaattgttctttagaaaccagaatatagtcagttcttgcctttttaaaataatcggatagtccatgctttttaattgaaattaatccatttacatttaaagtaattattaatatggttatattaggtctatcattttttgcttttcttagggaagggattttatttgcttttgttcctcctcttttgctgattttgtgttaaccaaaatttcttattaattttaattcttctgttggttttctagctatatgcatcttagctttttctttaatattgaatcactttggataagacatataattttttcaatgatgtgtttccagttccactacttatccttagtattattgtcacagttgttgcatttatatactttgtaaacccatcagtagtgttgtattttttgctttatgctgtcatcttttatagaaaactaagatattacatatatccacataattaccatttctggctgtcttcatttcttcctgtagctctaagttgccatctagtgtagtttccatttggactagagatctttctttagcatttcttgttatagatctaccaatgacaaatagtttatttgaaaatgcccttattttaccttcatttttaaaggaaacttcttctgaatactagaattcttggttgactggttttcttccttttccttcttcagtaatttgaatatgtggtcccagtgtcttcagacttaaaagtttctaaggagaagtctttgttcttatcgttattgttgccgttgttttcctgtttatgacgtcattttctctggctgctttcaagattttgtttatccttggctttctaccatttgactaaggtgtgtctagaagaagttttgtttgtgttattctgtttgaggtttattgagcttttgggagatatttcagttgttgtgtcttcagatgtcttttcctcctttcctctctctagagtccaattaaggtactgcttcctgttgtcacatttttgggaattctacttatttttcattcatctctttctctttatgttcttcagattattctgtattcaggttcattgcagatggcagaaccaagcatcaatccgttgcttagccagtctaatgcatttattttagtaaatgttttgttcagatctaggcttttagtttttctggtttcatttttctcccttgagattgccatatctgttcacttattgataccatattttccttcaattctttgggcatgtttttcagacgtttttgaaatatttatgataaatgtttgaagtctgttaaatccaacatttcggctcacttggaatcagtttctgttgactatcattttacctgcagagggtcaagatttcctatttttttcttgtctagtggaaagttggacatatgctgtagtgagtctgaactcttgtgttcttctgaggattattgtgtttttattgtagcagactgttaataaactgcttggtcaaactacacactttgtttttcctgtgatatgcagccgcttgtagctctcctctgctcttaggtctttgcactggtggtggttttagtgtggcaccctgtgagtctcccctgtgtctgcaaaatttgaaagttggctaaggatctgagtagagatggacttttctctgtggttgtctttattctggggattcccctagtttctagcactccaccagctttgagctctgtactctgacatttcaagctttatgccgccctagcttgagcatagttgggaaagagcatcatattcacagatttggctccatgttactcttttttaaaaatattgctttctggtttctgactgctttttcaccgtgctgcttgtggtttcctcagcacatatgtagtatgtagttcagctgtcagctagggatttcagcatcttatgctctgaatttgagtgtcacctctatattctagtgctgtcagagtgctttaaatttctagctgcttccccaattccagattttgatatctggcacctttagttggtgaggaactggcttttgtttgcccccatgttttgcagcaatagctgtgggagttgagcagtgccttgagccaagatgccacaaactcacaattcttaacccttctagttacagtttttgagatttaactctcttcctggcttttgcaaatactacctttagatcattgaaaaaaaaatcactaattagcttggcatggtggtacacacctgtaattccagcactttgagaggatgaggcatgagtctcacctgaggccaggagtttgagacaagcctgggcaacatagtgagaccccgtctttactaaaaataaaaaaaacttagctgagtgtgatggcagtgtgtgtagtcccagctacttgggaggttgaggtggaaggatcacctgatcccaggaggttgaggctgcaatgagctatgattgcaccactgtattccagcctgggtgacagagtgagaccctacctcaaaaaaacaaaaaacagttattataaatgttatctgtgagtgtttgtgtgacctcttcacccttcctgccattacagaaagttgatatttttagttttgaaatactagggtgagtatagcttgtctgtttcatgagcgtgtctttctgttgtgctttcattgcttttagggtcattattcagtttattttgttctttttttttcccttgagataagtttgtatgagagtcagccaccatcctttttctgttcttctttttatttgaaattaggttgtgtgcacttgtgcagggagggtgggcgggagaggttttcagaggccacaggattctcttttccggcatctcactaagtacttgacagtgtggcctggtaccttttgagctcaagggctgtcctcccattcctctccttccccatccatctgggctagaccttctctttccattgcgtcccccaccccacactatccctttcctgctccattgctgttctgttcccagcagtttttcttagtagaaggaggctttggctggctagtttcaagagcccttcagccttagactgctgcagtcccttcggacctggctgtgatcacttgcatccacctatagatggaagtgtgcaaagacccttctagttttggctgctattctcagctggctccctgagttttcctgtgaggtgcctgttgacagtgtcagggttcttctgctcccatccatcagacaccctgttgctatcctctgcttcctctgcacagatcctcatccacctggtcctgcagcttttgcccatttatcatccctttccagtcacttagttttctcttggctattatctcaagatttgagggattgggcaatttttgcacctcctctgctgtccccattctcctccatctgccttgaagtgaagcagattttatcctgctctgaagcctggggcatggatgagaattctttcaggattctctcaccaactttctccagtaacaggattgacagacgatagacaggtgtgggctctgttccctggttgccctttcacttgagagtgtagcccctgaccttgcctgtctgcgtgggctctaatctgaccttacagccccgtcactgtggctctgtgtccctgtccagcatcagcacgtggcctcgggatatctcctggcttcagacttggctcactttcctgattttttttttttttttttttagttttcatctttattttcctgatgacttctcttcattctagcttgtaaatgatgtatttttaaaagtagttaaaagatattttatccaactctatgtgtgtatgtgtgttttttgtactaggaggaattttgggggtacctttgtccttatattggtggtgtaaattatattttttaaaacttttctttttaaaaatagcttatgtgtctcatggcgtagcgtgcttttttttttttttgctctcctaagtctttttgatttttaaaatactttgtttgccgtgcatgttttaagagtttgctctctttaggaaaccagtcaaggtccataattttatgaaacttgggctgtcagttatttacagactaaccagtgtggacagaagtaagaggaaaagtgtaacacttgtgttatgaggtctgggagagctgaggccactccccctgttttacaggaggaaggtcctaagcagtggcctcgcccagtcagccaacctccagtttcacccacgagaatggtgggcctgagaccaagagaaggccattattcagtcatgttgaagtgcggggcgctgcctaagaacctagctcctaggctccccacatcactgcagggcaggcattagtcaccacttttagagctgaagagaatgagtctttggttaagtgttgaaatagaagtacagttcagatctcaaaataaagacctttgtcttacgaccgcatctccaggccagtggcctgggagccagagagagcttgttctctgatgcccagggccctgctcttcctccccatcagtaggaaacgatggccttggaggcttattttgctcatcactctcgccccactgctgtaaataacagaatggccctcgctctgcggtttctagaccctggcactgtttttcaaacttgactgtcatagagaccgctgctaaaaggaactgtctgcacgtccgtctgggtccattctcctactcatgaccagtggtggaaattttaggttgtttgaaaaaatgtcttttaatggcaaattaacattcaagaagagtaattagacttaataactggaaggcttttttagtccatcacttaaaacacaaacgtggaaaatgtcacagaactcttggcccatgtagcgcatgcatctgtcccatttctatacttttatctgagtgttccaggttacacttgttttaaataagagaagaaagagggagaaattgttcatagtagctgcatggttaacggtgttagctagtttgaatcagatttctaaatcagaccaaaaaaaccccaaaaaacaaaaacccagaaaacagactagatggtgcttttgaataggaataatatataaaccattgatctcaaaacactaaaaactagtatatgctcatcagtcagtgaattagctttttactctaaacttaagagtaagttttgctttacttttagaaacttttagaaccaaacatgggaactcatgtaatctaagtaacttagtagtgaaactctattctgctccccattgggggaaaaaaaagcatatgcttggtagaaagaatgttagaacttgaaagtagaaagaaatgttagaactcgaatcaggcaaggtaccatcagggctcagagccacactggtaattcgaatggcggaaatttcatagaattgttggagaggtgtttaggatcctccagagaaacgaacccataggttagagagagatatatagaaccagatttattatagggatttgtttatgcaatgatggaggcctagaagtcccatgatctgctttctgcaagctggaggccccggaaagtggtggtggagttccagcccaaacccgaagtcctgagagccaggggagccagtggcgtaaagtcccagtgggagactgaaggcccgggaaccaggggcagtgacgtgtgagggcaagagaaatggatcctggctcatgaagagggaaaggggatttgcccttcctctgtctacctctttgttctctccaggctctaagtggattggatgatgcctaagaggcttaagagggcggctcttctttccttagttcactgattcaaatgccagtgtcttccagaaacacccccacagacaaacccagaaataatgttttactagctacccatctgggcatcccttcagcagtcaagtggacatgtaaaactcaccagaggggctgaaaggagatgtgtacagaggggcagctgcagcaagccgctggcgcaggagcatgaggaaggagctgagagcagcgcagcctgcctgctgctgagattcgaccgcagggagcgggtgtacatgccgcagggacgcaagacctgccagtgctggacagagtggccatccacaaagtcctctgaggtcagcaggaggggccctgcatgccgacccaccggctgtgccacctggaaaaccacatgctggagaagaaaaggaatgcttgcagtccctccagcaccctctgttggcaaagcctggcatcaagcgtcacccaggatttcagagcagggcagggcgaggtctgcatctgagaagcagcaccttcacacctcctccacgctgctcccagagccatctttccaaaatgtgaaattcattctggcatccccctaccagaggatcttcatggctgtcaaacagaaagtgtttcaactttttattttgcagtagttttagagtttcgcagcaaagttgtaaaaatgatacagcattctcaaataccactcctccaacttcctgagtgttaacatcttctgtaacattgtagcacagttaccaaaaccgggaaagtctttgggaggagctatgcaggctgtattcacactgcacgttttcccatgaatgcctttcttctgttccaggacccagcattgcattcagatcctgtctctttaggctccttccttctgcgacggttcctcagtctttccttcgatgatctggacactttcaaagagtgcctttaagttcttttgtaaaatgttcctaaattctggttttctgtcaggttagtacatttttggccagaattccatagacacaacactgtgtccttctgtgttagtctccttgggcagccgtaataaaatacacaaaccaagtggctcaggcaacagacatttgtttcctcactgtttctgagggtgcattccaaggtcaaggtgcgggcaggatgggattctcccgagggcttccttccctcagaggcttgtggatgacatctctctgccgtgtcctcacacgctctttcctctgtgcgtgcgtgcaccggtgtctgtgtgtgtccaaatttcttcgtatgaggacaccagtcatgttagattagggctcaccctctagatctcatgttaactcagtcaccccactaaaggctcttgtcttcaaatgtggtcacattctgaggttataatggttagggcttcaatataggagttttaggggactgcagctcagcccatacatttcagtgggtcgcttatagatggggtatatgatgttgtctaattactggtgatattaactgtaatcacttggttacggggatgtctgccaagtttttccaccataaagtaactacttttcactttgtaattaatacatatcttggggacgataactttgagactgtgaaaatagggcatttctccttgaacttttacccatctttagcattcattccattggcctgcagcagttctgtggtgcttacctaatggtgattgtctgttcctttgtttcttccacatttgctaattggagttgttttgcaaggagaagctattccttctctgtatatcattcattcatgtctttttttttttttttttttttttttttttggagataggctcttgcactgtcatccaggctggagtgcagtggtgtgaatgtggctcactgcagcctctacctcctgggctcaggcaatcctcctgcctcagcctcctgagtagctgggactacaggcatgtgccaccacacctgactaatttttaatttttttctgtagagatagggtcttgctatgttgcccgtgctggtcttgaactccttggggtcaagcgatccacttgcctccacctcctaaaatgctgggattacaggcatgagccaccgcgccgggctcatttatgtctttatgcacttagatttttttttaactctatgtattataatccagtattcttattctgttactcagattgtcgtagctttggtcattggaagctcctgcagtttgggtcctatgtcctttcatcatgttttcccaatttcttattttcagctaccacaggacactcagggtgcatcttgaattttctttgctccagctctggagtcaggcacttgagggagcactgtttcattttattggcaaacggcatttagaaatgcacatgcggggcaacacgtgcttgttgccgttgcctctcgaacctctaggaggacaaagcttggaagtgcatgcctgtatcttagcccacacaaacctgcacatctatatatggatctctctgcatatgcagttaaaaatgagttcctattgatgaattccatttccagtttaacaccatagcattcattctaaccttcttcttttccttaattgttaactcctttctccagcagtgagaaatccatactccgctgtctgtaatacatttactcatttgctcaactctagtataacatcaaagtagtttcaaatttgctaacccaaatccctctgagaagcagctttattaactagaacacatgccagtgaactgtagcccatgggttcaatctggcccgcttgatgtttttgtaaataaagttttattggaacacagccccgcctatttgtttatatatcacgcatggttgcgagagagaccatatggcctccaaagctgaaaagctttactgtctgaccctttatggacatggtttgctgactcttaaagtccaagaatatagattttgtgtacggctctttttgtctttagctttatggtgtcccagtcaaaatactgttttccaagattgctttttcttttcacctccttcaatgtggttattttattcatttgtaattgagttagattaatttgttactgcttggattccatttttttgttccccatacacacatcctggttgattgtcattgtgtgttttggatgtgtgaaatattgatgtggcttccaagcgtgagagctgtgcaccagggtatacactcagaaaagcctcctcgttccagctttcccattcccattctgtacgccctccactccttttctacccaccctctgtgggtgaccagtctctttagtttctagtttgtctttcatgtatgttttgtgcaaatcaacagatacatatgtattttattgcattatctttcttaaaaaaaagagcaggtagtatggtataagatactcttctgcacttgacttttttcacttatcaatatgtcttggaaatcactcacatcagctcttaaagatcatcttcattttaaaaaatagccactccttcgtgtggatgtaccatagtttattcaaccactctcctatgtatggcatttagaatgtttctggtgtttgtaattataaacggtgttgcaatgaataaacttgtggatgtgtagttttatactgttggaggcctgccttcaggatagtttcttagatgtgggattgccagtttttaagagtactttgtatgatagggatattatattagtccttggtgatcctttgtatggtaggggtattatattagtccttggtgatattttgtatagtaggggtattatattagtccttggtgatcctttgtatggtaggggtattatattagtccttggtgatattttgtatggtaggggtattatattagtccttggcgatattttgtatggtaggggtattatattagtccttggcgatactttgtatggtaggggtattatattagtccttggcgatactttgtatggtaggggtattatattagtccttggcgatactttgtatggtaggggtattatattagtccttggcgatactttgtatggtaggggtattatattagtccttggcgatactttgtatggtaggggtattatattagtccttggcgatactttgtatggtaggggtattatattagtccttggcgatattttgtatggtaggggtattatgttagtccttggtgatattttgtatagtaggggtattatattagtccttggtgatattttgtatggtaggggtattatattagtccttggtgatgtttcttggacatactttctccccgttggcttttgactttgatcttggtgtatgtgtgtgtgtttatttttgcctttatgactcgcccttgcctacgggataatgacataatgcatagttgtctaagtgtgtgatgggttaccctttgccttttgttgtttgcattgtacttcctaactcctacttcacaagatttcagttcaggcatcagttccgaaatgatttctcaactagcatgagttaaagaaagagattatgttctgccttctcagagggtgctacttttaaaagttgtttgatcctcatggtaccctttaatgactccctgtgattatatgtctagtaccagttaactatgtcagagttactttcagattttatcagttgttgtgactgtatgggatgactcagtgttggacctgagactttgcctccaattttaatatatttcatgaatccatttccactaaaatcttttttgttttagtatataataaaatctacacatctcagttttgacttgcctggtgtcatagtccatttggagagctgtaacaaaatactataaactgggaggcttagaaataacataaatgtatgctcatagtcctgggggcccagaagtccaaggtcaaggcacccagcagattggtgcctggcgagggctgctctctgcccttctcacagtgtcctcacatggtggaagggactagccaggtctcttatcagggcaccaatcccattcatgagggcagagccttgtgccactctcctatgtatgagacctagttatttctcaaaagtctaaccttttagtaccatcatactagggattgggtttcaacataggaaattttgggggacacaaatattcagaccatagcaagtggtcatttgtgtctattcagttattgcaggcaattccttcagtaaatagagaaagagcttgtcaatgcatatcatcttgtgtcagatcagccgtacagaggtccatttactgggagctaatgaagcttcagtttcaggtctgacagaagtttttgatagttggcgttatagaggggacatttttgcatgctcattaattctttagtagttaagaaggatttcctctggaagcattaattagcaagaatatgaagtaaaagtaaaacatagtagaccatgtaaaaacttcctgaactatgttgcatagataatactaaagatagaactagcagttgtttatttttaataagctctctagacttaaactattttaaataaaaacagagcacctgacttaaaatagcatttttaaaagtacctcttcagtagtaataggctgtcactgctagcttattggttattttccctcagctcttgctctcttctggtcagttatggattcttgtttgaggagaggagctggcaacactagttggccctctctgtacttaacatcatgaggctcctagaatttagtaaggagatactcaaaagtagtctatatgggtttttaaaaactagcttttaattacacaagtactcaatgacattattctttttttttttttttttttgagacagggtctctgtcatccaggccataatgcagtggtgccattatagctcactgcagcctcaaactcttggcctcgagtgatcttcctgccctgcctttccaaagctctgggattacaggcatgagccaccacccctggcctctctcttctttaacaaatactaaattaatttatttagtttagagatgggtctcactgttacccgggctggtctggaacattataaagactcctgttggccatctcacttgactgttgtcttccaccctcttccccattcatcagctcttagtgttggtctcccctggaaccttccacatcatctcctgtgcctttgctgtctgcagggtggtccatggactggcagcagcatcaagcttgctggagttggttagaaatgcagactctgaggcaccgccccaatccagttgaattggaatctgcatcttaacaagatctttggtgatttgtagggacatggttttgtatacatgttttctatagtgaacatagaaagtactgccaatgtgtgtttagaatgtacacaaacgatatgatgtaactttttccatcaacaagatgccctagatacctctaaagatcactctgtgtggtgtgtgtagacctgtctcattctttcttagttgcttcctaactttacttctgcagtgttaaatgattagtcacttccccattgaaggacattaaggttgtctgcagcttttgtttttttgggatgtccggtgtagcggtgaactcactctagggcacgtcttgtgtacatgtgcccagaaagtagctggatagaagagtgtgaacatttttaacttaaacatcctgctaaattgccctccaaactggttgtatcaatctgactcttactttgtttcagtgatcaatttacatagtctttattctttataacattgttttaatggccatagcattataatgttttcatatcaagttgcctatccctcccctttgctgtaattcttcaaaattatattggcttttaaagaaattccacagtcttctataggaaatttaaaatcagcctgtcaagttctgtgaaaaattctagtagggatttttttttttcatggctgaagattgtattgaatttctagattaatttgggttggagactaggtatgtgaagtgttgagccttctgatactcatctctgaacatggtatttctcccaatttacttgtcttcttctgtccttgagtaaagttttatagctgaatgtataggtatatgtgcatttgtatgtgtgtgttgtgtattgtagttttgtctgttttcttttagatttattcttaggttgtttttctagctattacgaataggattttcaaaaagactgatttctaattgattgccgttgtataggaaaatcactaagttttcatatgtttaccttgttcctttgctggacactgttttaatggtcagttagagctctaggattttggagtcggcagtcttctaccttcgaattaattatagttcgtacttgcttttccttgtgtttatgcatccatttcattttctcatctggtgtaggctgggaacttccaggaccattttgagtagtaacatggtagagaacactgccgtcgtcatcttcgcctactggagtgcttctagtgtttcaccattgaagtatgagcattcccaaaaatgtctagttgtagatattctatccagatttgctggcgaagaggtctttgttactttttaaaatcatgagtgggttttaatttgatggtgtgcttttgcagcatccgctgatattcttaggttttctcctgtatctaatgatggtagtgacagattttctaggactgaattaccctgttatttcagggacttactctactgggttatcatttattcttctgccactgatggattcattttgctaaattatgtgtttaggatgtgtaaatatctgctgtgagattgacggatccatttgtgcatgtgtgtgtatatgtgcacatgctgttctggttttattttatccgattgttattagaatctaattagttgtttcttgatgttttggtggaatttgcctcaagtttctatctcagacttgtaaacagaattgttggtgcaatttgttttttcgtttttctgttttttttcaagacaggatcttgctctgtagcccaggctggaagtgctgtggtgcgattatggctcactgcagccacagcctcccaggctccaacgatccttccacctcagcctcccggctggaactacagaagtgtgccactatgcctggctaattttttttttttttttttttgtagaaacaggattttaccacattgcctaggttggtcttgaactccagcttgaactcaagtgatccacccaccttggcctctcaaagcattgggattacaggataagccactgcacctggccaagtattttttatttctaataacaatgaacttttggtgcatctggataggtagcattcccattattttcatttccacattgagttaaaattatttttggcaaacttttgggaacaaaacattttcttaaaatgttgaagtaagttttcttaaactttcttaaaatgttgaagtaagttttcttaaactttgtgtaagcagctatttttatgttagttaattattttagagttgaaatcatgagaggggaaaaacaacctttaagtaattgacttgaacctattagaaagtgaaactgaacaggtattttactgttcatggagcatatgcagagtcaacctaagaggtcaaaggaatttaacttataacaagaggaagttctgcttcagttcactgtgaggacttaatattagaaaagtagagtttacagacaaatttagtattttgttattgttgttgttttggagacagggtcttgttctgttgcccaggctggagtccagtggtgcagtcctggctcatactgcagcctccacctccaaggttcaagcaattctcgtgccccagcctccctggtagctaggattacagccggctaccatgcctggctaatttttgtatttttagtagagatggggttttaccatgttggccaggctgctctcgaactccttgcctcaaatgatctgcccgcctcagcctcccaaagtgctggaattacaggtgggagccaccccacccagcccaaatttaggattgagaatagatcctacagatgtgccatgtgggattcatgtcagcttgttgtagggttttgatggaatccattcaaagaagagggagaggatgaagagagccagccagattaaggggcagtgttgtagggtctgccagtcccttggtaacagatctcttattcagaaatattctcatttttcctggtttgtgacccttagtttgccttctcttcaatcccaaagtccgatttttaaagctgccagtaggaacttgagctttaatagtacatgcttatgcttttatactagtaataacaaatacttacagatggaaataggatatgtctgtgttctcaccctccctcaaccctaaccttccagaatatgcctgaatatgtatgtatgtgtatatatgcatatgtttatgtatatatcgtgtatcacataaatagatttttaaacatgcaccagaggtttatataaatatagctataagccttttaattttggaacttaagaatattttgtatgtcactatgtagtcagttaccacatatcaaccttctctacttaagagcctcatagttttattccttagtgtagaatactgtcatttagccatttctctgttgatttttaggttgtttacagttttttccaatagacttactatgtcagaaggaacacacatttaaaaaatctgtataaccagattgccttccagtgtatttgttcatactcacagattgagtgcctgccttcctgcatgtgtatcaatactggttattatcagtctttaatttttgctaatctaatggacagaaattggcatgtgattgttgtaatagtgagatttcacttttttttttttttttttttaccttttttttttcccttgtccaaggtgtgcctatttaatgttcttcgatcaggcagttggcactttccatattatattcagtggtcccgtgtcagcattttctcctaatttactgcctgttttggcttttaaaaatatatgtattttttgctctacagaatgtgtttatcatcaactctttctttatgacagctggcttgtgtgtcttggttaaaaagtccttttctttatcaacattataaacaccctcctatattttctttgagtatttttataggttttttttttttttgacgttatcctattggaggatattattgtttatgtttgggaacatagagattgagctttaaaatttttccacgtgaaataaccagttgccccaatagtttattgaatttcatgttttaaaaatgctacccgttggcatacactaaatttctgtatatttctgaagtttctgttcagcttcatattcagtagcagtggcagagctgtcgttaccccagctgtagaggacgcactgagcatcaagcacgcaaatctctcgcgtccctgttttttttttttgtcaaaattctcttgattatttttgtgtatgtaggttgactttaagagttttattttggattttgtaagtagtaaaggggttgcattttacaaagccaaaaatacaaatagccccaagaaactactactacgaagatttatttttatttcccatctgctgggtattgttttaagtactttgcagatattgttacagaagaagcagttatactttgatttatttttctttctttcttttttttttttttttttaatggagtctcactctgtcaccaaggctagagtgcacagtagcacagtcttggctcactgcaacctccacctcccaggctcaggcagtccttccacctcagcctcctgaattgctgggactaccaccatgcctggctaatttttgtatttttagtagagacggggttttgcgatgttgcccaggcttgtcttgaactcctgagctcaagtgatctgtccatctcagcctcccaaagtgctgggattacaggcatgagccactgtgcccagcctatattttgatttcatagtgagcaaaaaattggtctgattgcatgactgtagtggggaaatgataataagctgacacctatgtgttttagctgagacagtataaaattgtgtctagtatagatttgaggtgtactgaggttccacttgcccctcaagggacacccccaattctcatatacccaccttgaacacagttaacagtgtttgtgtcctgctttttataagtcatgagcatttcctgatatcatcaaaatgcttttagaaatacaactaataaatatattgtgtcttgcctgttgtattgttgcgaaatctagttattcctacaggcattgtatttttttggtggtatctttcttttgcagttgtgttgtatgtgaaagagtatgtcacctgtgaggtatggagcctcctaaagagacctgggagccagctaacttcagccggagcctaatactcatgcattgaactgtgtgctctttccctcaggcctttaattacaggtacacagttacaagtaatactgtgacctactcttcaatcaccctttcctttttaagagaattaaaaaaaaaaaaaactgtgaaattcctggatcagaagccatggcttttgtcagagccagctactcactcccaccggcagtacctgagtgaccatctgaacattcccttacgagccaccactagacagtacattcaaaacttagctcatttgatagaaaagtgttatcttttaatttgcatttcttagctcactagaaggtaagtgatgtgggaatttttgttaaagttagtatttttatcattttaaacttttaagtctgtaatttacatatctggactttattctgcccagtgttgtgtcttgagggcctaaatctcataatcaattagccaccgtttttgtattattcatgactcatcgtgacttccaaagtttaaacttctgtgtgtactagggtttgttttgggctggttgctgcgtcagaattagatgaatttgtctgtagtctcattgcttgagacaaaatatcttctaaagaaactgaaataacatctttttcatattaaaaacgtttaggcattggcacttcttgttttgtggctacaactaaagttgtattttgtcagcctttaaatgcttaagtaagatagtagctatttacatttaatatggaaaagaggccaggtacagtggctcacgcctgtaatcccagaactttgggaggctgaggcgggcagattgcttgagcccagggttcaagaccagccttggcaacatggcaaaaccacttctctacaaaaaatacaaaaatcagctgggtatggtggcacatacaggtagtcctagctacttgggaggctgagatgggaggatcacttgagcctggaggtcgaggctgcagtgagtggagattgtgccactgcattctagcctgggtgataaagtgagcccctgtctcaaaaaataaaataaaatataaaataaaataaaatggaaaacaccaagaaaaggagtgtgggcaatataaatggtattgatattgttaaacctttctaagaaagattgtttctatgaaagggagattttctaagccttttgaaggtgtttgatacctccctgtgttaatgcggtgtgaggtatgtacagtgaacagctgaattagtcagcagtctttgcccttagttgattgtgcggaccttgggggtgttagaattttcttcagtgtgagtctgagattggagatgtattcattagatgcatagagtttattgacttttgggccacaatttgattgtcttccatgagcaaatggacatttctcttgtgggtgccttgttttcctactcatattatgcttatcctgctttgtctgggcatttttatcaccagattaattttccttcttcaggagggaggcacagttgtattccgtagtagagatgctaaatgggtaaggtgtgaaagctgactctgaccacaattgcttagcatgaaaactgtggatgtaaaaatcatgttaacttgagtgtaactgtatcaccaggtgactgaggagagaggcacgagggcttatttattcagttactttttctttttccagggattgatcccttcctgcctttaagaccacaggtctgttgtaaaagttaatgcaggtgcggtgtcactgctatcctctctgtaggtccctgtgaattgggagtgcttcctgataccccacagaggtgagcactgggagtctgagtattgtccataaatccaactgtttttataccttgataatggaaatgctacctggctctttttctttttaggttcgttctctctctctctctctctctctctctctctctctctctctctctctgtgtgtgtgtgtgtgtgtgtagctcttcaccagtttttcatttttcgtgaatagggatgttatttatgtgcattggatttaatgcttttattataaatcattaaagtcttacttgtatgttgaaatttggggatactttattcatactcaactcatagaagtaaagaattacgtgtgtcaatcattggttctcaagcttcctttgttaagatgttcccactccctcattggacaggtggctgaggggtttgcccagacttaaaaatttgtcatgtctaccagatagtggtggcttctgccctttttctttctggtctgttgacaaccttcatgtattgggaacttgctgtttttggggtccagctcattgctttaaaggtatcatcatgacaacatcttgaggctcaggtatctgcaattttgtagttaagaacttcaggtcagagaggttactagtgatgccatcttccttgatctctgcttatttcttctctgatctcataatctgatatcaggtgtttatgacagtggttttcagagggggaggtagatcaaattcaccctcaagggacatttggcaatgtctggagacattttgtgatggtcatagccaggttggggttgaggggctgtgctcctggcatcttatgggtagaggccagggattctgctgaacatcctgccatgcataggatggccccacaccaagagttacctggccccagatgccagtagtgctgaagtcaagaaaccctgtgttatgagaatgtaccagatactggtggtggagtggaaggtctggtggtgacttcagcaggacaagagttgttaagggaggctgagtagccagagaaatgaggagaggggccatcctaggccgtggtggggaatgcaggctgattcctaatccatctccctctgtgttctctgtggtgattcatcctatggccacacagatgcacagagagctcttagagccacagatgccagcacagagagctagattttccccaaaagtgcataaatgcacccaacaggtagattttaaagtgtggtttttcagcagttgtagcatttccctgttatttcagggctctgaatatacctctgtgacttgaaagtgatcgtgaaaaatacctgatttactctgtggtgagacaacagatgttaaagacagcttccctgatgttaggctataaagctaggcgtttctccctcctcacagcaaagttttacatatcaggttcaactttctgaacccagcttgtaccacggtaaagagatgggttcctctgagggttgggttctgctattttcctctctctctctctggcagcatcggacctttggggtcctgaggtttggctcttggaccttcgggaggcatcccagtgagggaatcgagggactttgatcttcaccacagccctctcactagtggatgttatgttctcccccaccagattgtatttaagaagaggctgcatagacaggaaaactttgaggagctatatgaaggaaaacaggaccaaattaaaccagttcccttgtgagtgcactgggaagtgattggaagtgatgcccacaagatgactgagataccttaattgcaggtgtggaaacagtcctgcaaaacgcctgtgaaaatagaaatatagtggacactaaggcagagcggcagcctgcagcgtgcagaaacacgggaatcatgagacatcttgaaatctgtaaaacatccgcaggccttgactcacatctggaatgtgacatccacaaccagaattgtcttacatcttactcagttcttggcacagaataggtttcagtattaatagcagtgggagccatctttacattttctaacctggcttttgattgtattcatcttattaatgatgtcatgtagaatctcattttacctttatcattattcatttctttcttgccttttcatctttgtggttctagtgcctttatggtccaagtgaaagttgaggtatacaaaatataaatcttaggagaacagctctctgaagaaaaaagcacaacaaaatgtaaatcagaggagaggtgattatcatggtcatatgggaattctttttttttttttttttttttttttttttgagacggagtctcactctcactctgtcgcccaggctggagtgcagtggtgtgatctcggcttactgcaacctctacctcccgggttcaagtgattctcctgcctcagccaccccacgcccagtcggtcatatgggaattcttcatataaaagcattccttgtggcccggcgtggtggctcatgcctgtaatcccggcactttggggggccgaagcgggcggatcacttgagctcaggagtttgaggccatcctggccaacatggtgaaaccccgtctctactaataatacaaaaattggtgggcgtggtggcatgcacctgtaatcccagctattcaggaggctgaggcatgagaatcacttgaataactcgggaggcggaggttgcagtgaactgagatcacaccactgtactccagcctgggctctagagcaagactgtatctcgggggaaaaaaaaaaagcgatccttgggtttccatgtgttcctaatatttgtggcttaccagatttaaagcatgctcctttcagagtacatagattaaaatatgcacctacattgtccatttgaggtaattgtagccatataataattttccaaattttagttgttcttggtggttgttgcaataacgtatgtaccagccaaatggttacttttttctttaagtaaatcagctttttatttatttatttttttgagatagggttttgctctgtcacctaggctggagtgcagtggtgtcaatggctcactacaaccttgacctcgtgggctcaaacgatcctcccaactcagcttcctgagtagctaggactacaggtgcacaccacagtgcctggcaaatttttcttttctttattttttttttctttctgtagagatggggttggcggggggcatctcactgtgtcacccaggctggtcttgaactcctgggctcaggtgattcacccacctcagcctcccaaagtgttgggattgtagatgtgagccactgtgcccggcaaaatcagcttcttaacagccttttcttttaaacgtaaatattattttgccataaatggagtatcattcagcttaaatagaaatataaaaagcattaacaaagctacaaatttaatctggggggaaaaaatcaatggtaccattcatctgttaatagttttggaataaccagcctgagagtcaattcacatgtgtacacttgtaaagtataaaagctattttaccattttctttattttggttgaataccaataatttctaatcctggcaatgagggtggcttgggtctccaggagccaccagcagccattctctggaatctatctgaatgtgtcaaagtatgtgtgtagtatccagacagtgggataagagggccctttgccacacattgctgccatctgctatggaaaatgaaaccctatttcatgtgttttcagttctcttcataatgtgcaaaatattttcagtgagttttcagattaatatttgtctcagtcatgtagacaacaacaaaaccgtcctgtgttttgttgttcagatgtgaccccacaggtctacttctgtgctcacaagggaatttctctcttcttgcatgtccagtaccaccttgtaaggataaattcaggtgctttaaatgaacaaataacttagcagaatacactgattcctgaagcctgcccaattccttctgtgctctgacgtagacatggctgtgcattgtcgtaagaagtcgacaccacctatctctatagaaagcagaggggaaaagtgcaggattcagcagcttttcttaacaaattgtaacattttgagttggcttccatatataaacaaggagtagataagtttattttagcattttagcaaaaacacttagtaatttagtatatttccgtgacatttacctttaagactctttttaattacctaattgatcttatccatgatgggttcaacacaaagaacaaatattcagagaacagtcccaattccatttccaaattatgtatacttaaacataacatacctactaaaatattgctggcttctaggggtgacttttggtctgtcactggtaagagtgcatggatacacatggaaagtcagtgttcagaaatcttgattggcattcatgcatgccttccatactatctgtagtccttttctcttgtaataaaatacatgtaacctaacatttgccattataacaattttaagtatataattccctgacgttaatcacaatgttgtatttgtatctccaaaacttttaaattcccccaaacagaaactttgtaaccgtaaaatgtatgtaacctaacatttgccattataaccattttaagtatacaattccatgatgttaatccaatgttgtatttgtatctccaaaacttttaaattcccccaaacagaaactttgtaaccggtaaaatatacgtaacctaacatttgccattataacaatttgaaatgtacaattccatgatattaatcacaatgttatatttgtatttgtattttatttgtctctccaaaactctttaatttccccaaacagaaactctgtaaccattatgtaaaaactccccattcgcttcccccagtccctggaaatctctattctactttctgcctcagtgaatttgcctattctagatatttgatataagggagatcttgtagtatttgtccttttgtgtctggcttccttcacttagcataatgttttcaaggttcatccgtgttccagcatgtatcagcactttattcctgtttatgactgaataatactcttacatagatacaccacattttatgtatccattcatcttagtggacatatgcgttgtttccatattttggctactgtgaatgctaccatgtaccttgataattccagtatataattgagtccctgttttcaggtatttggtatatatgtctaggagtgggtcctgtgggttgcatggtggatcattgttgggtcatatggtaattcgatgtttaactttttgaggagctgtcaaactattttacacaatgaccacaccattttacatttccactagcagcgctcggctcggcagcacttattttccatttttaaaattatagtcatcctcatagatttaaagtagtatttcattgtgattttgatttgcattttcctaatgagtacgatgagcatcacttgatatgcttattagctatttgtatgtcttctttggagaaatgtctagtcctttgcccatttttcattgggttatttgtcattgttgttgagttttgttgagttctttatatattctggttattaagcccttaccttaccagatatgatttgcaaatatttttatgttggcttttcacttgcttgataatgtcctttgaaacacacaagtttttaattggttaaagttcagtttacctatttttttttcttttgctgttcatcctttgggtgacatatccaactgtttctttttcaagattgttttgactttctgggaccttttgcaagtccatatgaatttgagtacaagcttttccgtttctgcaaaaaaggctgttggattttttttttctttgaaacagagtctcactctgttgcccaggctggagtgtggtggcatgatctcggctcactgcaacctccatctcctgagttcaagcaatttttgtgcctcagcctcctgagtagctgagattacaggtgcccaccaccaagcccagctaatttttgtatttttagtagagacagggttttaccatgttggtcaggctgttctcgaactcctgacctcaggtgatccgccagcctcggcctcccaaagtgctgggatttcaggcatgaatcaccgtgccccactagctgttggaattttgataggccttgcatgaacctatcacttttggttagcatgcattgctagtatatagaaacactctgatttttgtgtgttatcctgcaactttgctgaatttattagctttagtagcattcctgtggatttttcaggattttctatatataggatcgtgtcctatatatagaattgtgaatgagtagtgatagttttacttcttttcaatttggatgccgtttgttttttgtctaattactctggctataacttccagttatacacttcacaattgagtgtattagctgtgagtttttcataaatgtccttatcatgttgaggaagttctcttctattcccagtgtgttgaatgttttaatcatgagttagattttatcagtgccttttctgcattgattgaggtgatcctgtggttttcctttctttgatttttctaatgcaatatattacattgattgattttctcatattaaaccacccttgtattcctgggataaatcccatttggttataatccttttagatgttagatttggtttgctcgaacagccaatcctcattattcatggattccatatttgcctatttgctaaaatttatttgtaacccaaaaattaataatgcagtggtttcatggtcatttatacatacacctagaatggcaaaaaaaaaaaaaaaaaagagagtcacctgacacacatcttcctagctgagactgcccataacaacacactgccttgtttcagctgtgagaccaccagcgggtggaagtgatgggggtaatgcagtgtagtaccaaaacctttggcctcagagccacttgaagtggtttaaatctcaactctggcacctgttagtgggacggtctcaggcaagtcacttaacatttttgagtttcattttctccattctgtaaaatagaatcgactaggatcagttgtttgtaggattataatctatgtgagatatgtgtgtgcatatttaccttatgagcaggtggtttagtatccattgattcaatggtcctcacctttatttctaattttagttatttgtgtcttttctttttttctctgtccagctaatggtttctcaatttttattgagttcttcaaataaccaactcttaatttcattgatttttcttttcttctattctctatgtatcttacccgtaatctttattattttcatccttctggtaccttcgggtttactttgctcttctttttctagctccttaaggtgtaaagttaggctgctgacatgagatctttttttcttttttaatgtaacctttacatctataaactttcctctgaccactgccttcactacattgcatactttttctgtgttgtgattttgttttcatgcatccctaagtgtcttctactttcccttgtgatttcttttttgacccatggttgttgaaggagggtgttgttttaatttccacatatttgtggattttcccatttttcttttggtgttaatttctagcttcattccacaagataactttgtaagatttcaatttcttaaaatgtgagacttgttatgaggtctgacatttggtctgttctggaaaatgattcatatgcacttaagaaggtatattctgctgtttggtgaagtgttaggtctagttggtttatagtgttgtgcaagtcctgttttgatcttctagataatctgtcctgtactgaaaatgtagtgtattgaattctccaactgttattgtaaagctatctttttcccttcagctttgtcaatatttgcttcatgtattttggagcactgttgtttggtgcttacatgtttataattgttatattttcttgttgaactggcctttatgtcaccatcttttgtgtcttgttacagtttttgacttaaagtctgttttgtctgatattagtgtagccacctccagctttctcttgcttactatttacatttaatatattttttactactttccctttcaacctttttgtttttgaatcttgagtttcctgtagataacatatagttatataatgtttttatatccattctgccagtctctgccttctgtcagaaaagtttaatttacatttcaagttactactgacaagcacttcttccatgttgctatttgttttctgccttatacttttgttcctcattgccttaattactaccatttgtgattagttgatcttttttctttttaataatggattgtttggattcccttctcatttccttttgaatatatagcttttagatattttctttgtggttatcatgggaattatatgtaatatccacaattgatgttgttgtttaagtcaatatcagcttcaatagcatacaaatgtctgtctatacagctccatctgctccctttatgttcttacaaagtacatattttatgcattgtgtgctcaataacatggattgataattatttttcatgcatttgtccttttttttcttttttgagacagagcctcactctgtcacccaggctggagcgcagtggcatgatctcggctcactgaaacctctgtttcccagggtcaagtgatctcctgcctcagcctcccgagtagctgggattacaggcatgtgccaccacgcctagctaatttttggattttaagtagagacggggtttcaccatgttgactaggctggtctcaaactcctgaccttaagtgatccgcccacctcgtcctcccaaagtgttggaattacaggcgggagccatcgcacccagcctgtgtatttctcttaagtcatgtgtgaaagaaaaagtacattcaaaattcctaaatacagtactactggcttttatatttgctcatgtatttaccattaccagagagctttatttctttttcagctttgagttactgtttagcatgctttcacttgaagcatttctttcagggaaagtctagtggtgatgaacttcctcagcttttatttatctgggaatgtcttactttccccctcagtttcaacgttagtttgctggatataggacttttaacaggttttttttttaactttcagctttttttttttttttttttttaagagattgggtcttgctctgttgcccaggctggagtgcggtggcatgatcatagctcactgtaagcctcaaactcctgggctcaagtgatctcctgcctcagcctcccaagtagctgggactccaggtgcacaccaccatgcctggcttcagcattttaaatatgttgttccattgatttctaccttccatgatttctgttgagaaatcagctattaatcttattaaggataccttgtgcttgtcaagtcacctcctgctgcttttaggattttctttttgtcttttgcttccaatagtttgattatgatgtgtctcagtgtggatctttttgagcttattcggcttggaattgattggctttggataagtaaatcatgtctttcttcagatttaggaagctttgtccattatttatttagataatcactttgtccctttcttttctcccaagtcttccataatttatttgttggtatgcatgatggtgtcctgctagcctactaggctctgttcattttttctttattttctttactttctacttttcagattcagtaattttaattgtgctatcttcaagttcgttgattaatttttttctgttaaaaactttctgagcctctctagtgaattttttatttcaattatgtacgtttcagctccagaatgtttgcttggttcctttataaaatgtgtttctttattttgtttataaattgttctgatttccttcagttcttcatatctttcttttgctttttgagcttatttaagacagtctgcctgggtttccttctggctggtttctgtcaattattttattattttgaatgaattgtacttccctatttctttatatgctttgtggggtttttgttgttgttactgttgaaaactgcacatttgacattataatgtaattctggaaatcagattttcttccttgttttgctgggatttttttgttgttgttgttgaaggctagaattggctgtttagtgacatttccacactattctgtagagactgtattccttattgtttgtggtcactgaagcctctgttcctcagattgtgttccactgtgttttggcagagatttctttggaagcctggagctaagcaaacaaaacaaaacaaaacagagcacttctcctagtttttgcatttaactctgtgactccaggtttgcattgagccaggtgatcagtctgaggtgaaagccgagaaacttctcaggtctttctgagcgtgcatcttgccctgggcttgtgcatggctgtctttccccttacacccacatgctttagaatgtcctgatcttccaaagaaactctcctgcagcttttctgggggtgcctgtggacttgtttgtatatctcaacttgatcatttagcctaggtgtttgtgggtgttagtttgtgaacaatctcccccatttttctggcttaagggcccaagttcagatgtcgtgccgtggtcttctagatagccttcagtcaggttagaacatacctacacaattatttgtgaataaggttggctgtgctccctctagaaccaggaaccagggactttcccactgggaatgcaggctgtcaggccagggaggcacagcaagtacaagtaaaaataccacaaacctttcctgtaattttgaagttgctagcttcttgattcaatgttcacttgtctgctgccaatctttgacttatttccagagtcctgataatgttggttgtaagaataattgctgttttttggaaatgtttctgtatgagaagtcagagcttcctactctaccaagtctgcccctgtctgtacatctgaatggttgtggtggaaagtcactgacaattttcaatattcaaggtgtgcgtaagcaccatccctgcaactgtgagtctgtgtaaaagggcttatcaccgcactacccatttaaacaattggcgctggcttatgattcttctaattatataataaacagtgttaataaatctaaatattcatccttatgccatctagaagtcatctggtggaccactaggaggatgtacatcatgctttgggaaactctcttctgccataagtacagatcttggctggcattgatagttttccttccccagccccctgctatattctagatcaggctaccccattgtgtctgtggtcacagccacatttactggcaggcactccacaactcaggaatagtttgtgttctgaagctttttgttatttttaaattggtgcttgatctggaaactttgaaatatgttattcataaggcttaggtttcttttatttatttattttaattttttattttttcattattatactttaagttttagggtacatgtgcacaatgtgcaggttagtgacatatgtatacatgtgacatgctggtgcactgcacccactaactcgtcatctagcattaggtatatctcccaatgctatccctcccccctccccccaccccacaacaggccccagagtgtgatgttccccttcctgtgtccatgtgttttcattgttcaattcccacctatgagtgagaatatgcggtgtttggttttttgttcttgcgatagtttactgagaatgatgatttgcagtttcatccatgtccctacaaaggacctgagctcatcattttttatggctgcatagtattccatggtgtatatgtgccacattttcttaatccagtctatcattgttggacattagggttggttccaagtctttgctattgtgaatagtgccgcaataaacatacttgtgcatgtgtctttatagcagcatgatttatagtcctttgggtatatccccagtaatgggatggctgggtcaaatggtatttctagttctagatccctgaggaattaatgcctaggttttcttctagggtttttatggttttaggtctaacatttaagtctttaatccatcttgaattgatttttgtataaggtgtaaggaagggatccagtttcagctttctacatatggctagccagttttccctgcaccatttattaaatagggaatcctttccccattgcttgtttttctcaggtttgtcaaagatcagatagttgtagatatgcggcattatttctgagagctctgttctgttccattgatctatatctctgttttggtaccagtaccatgctgttttggttactgtagccttgtagtatagtttgacgtcaggtggcgtgatgcctccagctttgttcttttggcttaggaatgacttggcgatgcgggctcttttttggttccatatgaactttaaagtagttttttccaattctgtgaagaaagtcattggtagcttgatggggatggcattgaatctataaattaccttgggcagtgtggccattttcacgatattgattcttcctacccatgagcatggaatgttcttccatttgtatcctctttaatttcattgagcagtggtttgtagttctccttgaagagacccttcacgtccgttgtaaggtggattcctaagtgttttattctctttgtagcaattgtgaatgggagttcactcatgatttggctctctgtttgtctgttattggtgtataagaatgcttgtgatttttgtacattgattttgtatcctgagactttgctgaagttgcttatcagcttaaggagattttgggctgagatgatggggttttctagatatacaatcatgtcatctgcaaacagggacaatttgacttcctcttttcctaattgaataccctttatttccttctcctgcctaattgccctggccagaacttccaacactatgttgaataggagtggtgagagagggcatccctgtcttgtgccagttttcaaagggaatgcttccagtttttgtccattcagtatgttattggctgtgggtttgtcatagatagctcttattattttgagataagtcccatcaatacctaatttattgagagtttttagcatgaagcattgttgagttttgtcaaaggccttttctgcatctattgagataatcatgtggtttttgtctttggctctgtttatatgctggattacatttattgatttgcgtatattgaaccagtcttgcatcccagggatgaagcccacttgatcatggtgaataagctttttgatgtgctgctggattcgttttgccagtattttattgaggatttttgcatcaatgttcatcaaggatattggtctaaaattctcttttttggttgtgtctctgcctggctttggtatcagaatgatgctggcctcataaaatgagttagggaggattccctctttttctactgattggaatagtttcagaaggaatggtaccagttcctccttgtacctctggtagaattcggctgtgaatccatctggtcctggactctttttggttggtaagctattgattattgccacaatttcagatcctgttattggtctattcagagattcaacttcttcctggtttagtcttgggagagtgtatgtgttgaggaatttatccatttcttctagattttctagtttatttgcgtagaggtgtttgtagtattctctgatggtagtttgtatttctgtgggatcagtggtgatatcccctttatcattttttattgcgtctatttgattcttctttttttctttattagtcttgctagcagtctatcaattttgttgatcctttcaaaaaaccagctcctggattcattaattttttgaagggttttttgtgtctctatttccttcagttctgctctgattttagttatttcttgccttctgctagcttttgaatgtgtttgctcttgcttttctagttcttttaattgtgatgttagagtgtcaattttggatctttcctgctttctcttgtgggcatttagtgctataaatttccctctacacactgctttgaatgcgtcccagagattctggtatgttgtgtctttgttctcgttggtttcaaagaacatctttatttctgccttcatttcgttatgtccccagtagtcattcaggagcaggttgttcagtttccatgtagttgagtggttttgagtgagtttcttaatcctgagttctagtttgattgcactgtggtctgagagatagtttgttacaatttctgttcttttacatttgctgaggagagctttacttccaagtatgtggtcaattttggaataggtgtggtgtggtgctgaaaaaaatgtatattctgttgatttggggtggagagttctgtagatgtctattaggtctgcttggtgcagagctgagttcaattcctgggtatccttgttgactttctgtcttgttgatctgtctaatgttgacagtggggtattaaagtctcccattattattgtgtgggagtctaagtctctttttagatcactcaggacttgctttatgaatctgggtgctcctgtattgggtgcatatatatttaggatagttagctcttcttgttgaattgatccctttaccattatgtaatggccttctttgtctcctttgatctttgttggtttaaagtctgttttatccgagactaggattgcaacccctgcctttttttgttttccatttgcttggtagatcttcctccatccttttattttgagcctatgtgtgtctctgcatgtgagatgggtttcctgaatacaacacactgatgggtcttgactctttatccaatttgccagtctgtgtcttttaattggagcatttagtccatttacatttaaagttaatattgttatgtgtgaatttgatcctgtcattatgatgttagctggttattttgctcattagttgatgcagtttcttcctagtcttgatggtctttacattttggcatgattttgcagcggctggtaccagttgttcctttccatgtttagtgcttctttcaggagctcttttaggacaggcctggtggtgacaaaatctctcagcatttgcttgtctgtaaagtattttatttctccttcacttatgaagcttagtttggctggatatgaaattctgggttgaaaattcttttctttaagaatgttgaatattggcccccactctcttctggcttgtagagtttctgccgagagatccgctgttagtctgatgggcttccctttgtgggtaacccgacctttctctctggctgcccttaacattttttccttcatttcaactttggtgaatctgacaattatgtgtcttggagttgctcttctcgaggagtatctttgtggcgttctctgtatttcctgaatctgaatgttggcctgccttgctagattggggaagttctcctggataatatcctgcagagtgttttccaacttgattccattctccctgtcactttcaggtacaccagtcagacgtagatttggtcttttcacatagtcccatatttcttggaggctttgttcatttctttttatttttttttctctaaacttcctttctcgcttcatttcattcatttcatcttccatcgctgataccctttcttccagttgatcacatcggctcctgaggcttctgtattcttcacgtagttctcgagccttggctttcagctccatcagcccctttaagcacttctctgtattggttattctagttatacattcgtctaaattttttttgaagtttttaacttctttgcctttggtttgaatttcctcctgtagctcgtagtttgatcgtctgaagccttcttttctcaactcgtcaaagtcattctccgtccagctttgttccattgctggtgaggaactgcgatcctttggaggaggagaggtgctctgctttttagagtttccagtttttgtgctctgttttttccccatctttgtggttttatctacttttggactttgatgatggtgatatacagatgggtttttggtgtggatgtcctttctgtttgttagttttctttctaacagacaggaccctcagctgcaggtctgttggagtttgctagaggtccactccagaccctgtttgcctgggtatcagcagtggtgtctgcagaacagtggtttatcatgaaccacgaatgctgctgtctgatcgttcccctggaagttttgtctcagaggagtacccggccatgtgagatgtcagtccgcccctactggggagtgcctcccagttaggctgctcaggggtcaggggtcagggacccacttgaggaggcagtctgccagttctcagatctccagctgcgtgctgggagaaccactgctctcttcaaagctgtcagacagggacatttaagtctgcagagcttactgctgtctttttgtttgtctgtgccctgcccccagaggtggagcctacagaggcaggcaggcaatcctccttgagctgtggtgggctccacccagttggagcttccaggctgctttgtttacctaagcaagcctgggcactggccggcgtccctctcccagcctcgttgccgccttgcagtttgatctcagactgctgtgctagcagtcagcgagactccgtgggcgcaggaccctccgagccaggtgcgggatataatctcctggtgcgccattttttaagcccgtcagaaaagcgcagtattcgggtgggagtgacccaattttccaggtgccgtctgtcacccctttctttgactaggaaagggaactccctgaccccttgcacttcctgagtgaggcaatgcctcgccctgcttcggcttgcgcacggtgcgctgcacccactgacctgtgcccactgtctggcactccctagtgagatgaacctggtacctcagatggaaatgctgaaatcacctgtcttctgcgtcgctcacgctgggagctgtagaccggagctgttcctattcggccatcttggctcctccccaaggcttaggtttctaagtcagccacaaatgctacccaaaactacataaagaagaaaaaagttgcatagaaccaaaaagtgagttttaattatttattttatacgtgtgctttcagaattccaaccccctagaggagttgggattttaaaccagtgtgatacattttctgtttgcttcagtttactttttatttttttcctttcccttatgggttctgggaattgagacttcggctttccttcctgtgataccacttgccactgtgtgtccattcgagagcatggctctcaccagcctctcccctctcctgtttttgcagtcagtactttgtccttctaaagtcctttaaaagattgctcattagaatatttttaaaatctgttagcaatagataattacagccttatttctatgctgaccaccatgcagcaaggaaaaatgtgcaaaggaaaagaggcagaaaagaactgtttatattgaatttaggggctgtttcaggccttggtatgctggtctctagtgtggctgaaggaaaaaatgctgggactgagtgcgaggaagggcagtgagtacatttctgattctggcaccttgatggagatggtcctatcacttgtagaccttgcgcctggttacagaattggggatacagaagtttgatggaacaaaatggaattatgtgagtgccctggaatggagtgatgggtgtgggtgcaggtatgtgtgtctgctcccacctctgctgggtggaagtctctctcatgagagtgagggcagcagtggtgttcacctgtatatccccagtacctcgtacagtgccttatacatagcagacactctcttgctgaataaatgaggatccagataagataggtcaatcattgttaaaggcatagacctgagtcagtgggtattacatgttcagggatatgaattggcaatttgttttattttactaatttgcttctgtgtacattcctcacagtgttacaacttgagtgacaatataatttatcattcaaatggaggcacatgaaagcaaaaggaggactgaaaattgttatacaatcttttggaattttttttgaccaatacatttgttgtagtgatagacataaagtagttttattaaaaaaattttcaaaaaattatgaagtaaacgtcagtgcgttacaataaagggatcacctgtacattacaaaaattagtaaatactcttttttttgttgtcgttgtttttttttttttttggagacagagtcttgctctgtcgcccaggctggagtgcagtggcacgatcttggctcagtgcaacctccacctcccgggttcaagcgattctcctgcctcagcctcatgagtttctgggattacaggcgagtgttaccatgcctggctaatttttgtatttttagtagagacgaggtttcatcatgttggtcaggctgctctcgaactcctgacctcgtgatccacccacctcagcctcccaaagtgctgggcttacaggcacatgagccaccgcgcccggcctcttattttttcttttcccgttggtttaagacagagtcttgctctgtcgcccaggctggagtgcagtggcatgcacatggctcactgcagcctctgcctcccaggctcaagtgatcccaatacctcatcctctccagtatctaggactacaggcgtgcaccaacaaacccagctaattttttttttttttttaaatagagatggggttttgccatgttacccaggctcatctcgaactcctgggctcaagcaatccgctttcctcatccttcaaaagtgctgagattacacttgtgagctatcacaccaggctgtaaatattcttgatacatttttatcatgtatctattgtaatgccttgtgactctttaaaagtttttcggtatgtctttttatttttttattttaataggtcttttgggaacaggtggtgtttggttacatgaataagttccttagtggtgatttctgagattttggtgcacccatcacccgagcagtgtacactgtactcaatgtgtcgtcttttatccctcacccccctcccaccctttcccccaagcctcaaagtccattgtatcattatgcctttgcatcttcatagcttagctcccagttatgagtgagaacttaggatgtttggttttccattcctgagttacttcatttagaataatgatctccagttccatccaggttgctgcaaatgccattatttcatttctttttatggttgagagtattctatggtatatatacaccacagtttctttatatacttgttgactgataagtatttggctggttccatgtttttgcaattgcaaatataaacgtgtgtgcaagtgtctttttcatataatgacttcttttcctctgggaagatacccagtagtgggattgctggatcagatggtagttttagttcctttttttttttgagacagagtctccctctgtcacccaggctggggtgcagtggtgccatctcagctcaatgcagcctccacctcccgggttcaagcgattctcctgcctcagcctcgtgagtttctgggattacaggtgagtgttaccacacctggctaatttttgtatttttagtagagacggggtttcaccatgttggccaggctggtcttgaactcctgacctcatgatcctcccgcctcggccttgggattacaggcgtgagccaccactcccggccttacttttagttctttaaggaatcctcacactattttccatagcagctgtactagttcacattcctgccagcagtgtgtttcctttttttaccacatccacaccaacttctattattttttgatttttcgattatgaccatcttgcaggagtgaggtggtatcgcattgtggttttgatttgtatttccctgatcattagtgatgttgagcattttttcatgtttgttggccatttgtatatcttcttttgagaattgtctgttcatgtccttagtcccactttttgatgtgattgtttttttcttgctgatttgtctgagtcatttgtagattctggatgttagttatttgtcagatgtatagattgcaaagattttctcccactctgtgggttgtctgtttactctgctgattgtttattttgctttacagaagctttttagttgaattaagtcccatctatttatctttgtttttgttgcatttgcttttgggttcttggtcatgaagtctttgtgtaagccattgtctcaaagggtttttctgatgttatcttctagaatttttatggtttcagtcttagatttaagtgtttgatccatcttgagttgatttttgtttaagatgagagatgaggatccagtttcattctcctacatgtggcttgccaattatcccagcaccatttgttaaataaggtgtcctttccccactttatctttttgtttgctttgttgaagatcagttggctgtaagtatttgactttatttttgggttctttattctgttccattggtctatgtgcttatttttataccagtaccatgctgttttggtgactatggcctggtagtatagtttgaagttgggtaatgtgattcctccagatttgttctttttgcttagtcttgctttggttatgtgggcagttttttggttccatatgaattttaggattttttttctagttctgtgaagaatgatggtggtgttttgatgggaattgcattgaatttgtagattgtttttgacagtatggccattttcacaatattgattctacctctccatgggcatgggatgtgtttccatttgattgtgtcatctatgatttctttcagcagtgttttgtagtttttcttgtagaggtctttcacctccttagatccactcctaagcatttttttttcaactatttttaaaggggttgagttcttgatttgagtctcaccttggttgttgttggtgtatagcagagctactgatttgtgtacattagctttgtatcctggaactttgctgaatttatcagttctaggagctttttggaagaatctttaggagtttcttggtatatgatcatgtcatcagcaaacggtgacggtttgacttcctctttactgatttggatggcctttctttctttcttttgtttgattgctctggctatgacttgcagtatgttgaatagaaatggtgagagtgggcatcctcgtcttgttccagttctcaggggaatgctttcaacttttcaccattcagtgttatgttggctttgggtatgtcatagatggcttttattaaagttatgtcccttctatgctgattttgctgagggttttaatcgtaaaggggtgctggattttgtcaaatgctttttctgctctattgagatgatcatgtgatttttatatttttaattgtgtttatgtgatgacaacattgacttgcgtattttaaaccatccctgcatcctgatatgaaacccacttgatcatggtgggttatctttttgaagtgttgttggattcagtttgctagtattttgttaaggatttttgcatctatattcatcagcgatttttttgttttgttatgtttttgtttgttttttgttttgtttttttgttacatcctttcctggttttggtattagagtgacactggcttcatagaatgatttaggaaggattccctctttatcttgtggaatagtgtcaataggattggtaccaatttttccttaaatgtctgataaaattcagctgtgaatccatcaggtcctggacttttttttgttggcaacttttaaattaccatttcagtgtcactgtttgttattggtctgttcagagtttctgtttcttcctggtttagtctaggcgggttgtatatttccaggaatgtgtccatttcctctaggttttttagtttatgtgcataaaggtgttcgtagttggcttgaataaacttttgtatttctgtggtatcagttgtggtatctcctgtgtgaattctagttgagagttttggatcttctccttgtcttggttaatctcactaattttatttatcttttgaaagaaccagctttttgtttcatttaccttttgtatttattttttgttggaatttcatttagttctgttttgatctttgttatttcttctgctgggtttgggtttggtttgttcttgtttttatgattccttgagatgtgaccttagattgtctatttgttctctttcagacttttcagtgttaggcgtttaagcatatgaactttccacttagcattgcctttgctgtatcccagaagttttgctaggttgtgtcactattatcgttcagttcaaagaattttaaaatttccgtcttgatttcattgttgcctgagtgatcattcaggagcaggttatttaatttttatgtttttgcctggttttgagggttcctttttggagttgatttccaattttattccactgtggtctgaaagagtacctgacatagtttagattttcttaaatttactgaaccttgttttgtggcctatcatatgggctatcttggagaatgttccatgtgctgattaatagaatgtatattctgcagttgttggataaaatgttctataaatatctgttaaatccttttgttataagttatagtttaagtccattgtttctttgttgactttatattaatattatattaatattaataataaattattaatataaataaattaattatatttgtattatttgtaatatataatttatatatattatattaatattcatatttatttatatataattatatattatttatatcatatatttatattatttatatataaacttgttaatataaaattatattacttatatattataaatatattatattatataataaattattaatataaataatataaataataatatataattatatataaataatactaatattaatataaataaaaataaatattaatataaatatctgttaagtccttttgttataagttacagtccattgtttcttcgttgactttctgtcttgatgacctgtctagtgctgtcagcagagtattaaagtcccccactatatattattattgtgttgctatctcatttcttaggtctagtagtaattgttttatatgtttaggagctgtggtgttaggtgcgtatatatttaggattgtgatatttttctgttggactagtccttttatcattatataatgcccctctttgtcttctttatctactgttgctttaacatttgttttttctgatataagaatagctactcctgcttgctttttgtgtcctcttgcacggaatgtctgtttcacccgtttaccttaagtttatgtgagtacttatgtgttaggtgagcctcttcacaacagatactaggtgaattcttatccattctgccattctgttctctttccagtggaggtatttcagttactattgagatgctaggtattattctattcattgtgctatgaatacacaacatgggaacgaatatgaaaacccttgtgggtttttttttccattatgttattgctatatagttcctgtgagatttatgctttaaggaggttctattttggtgtatgtcaaggatttgtttcaagatttatatctccttttagcagtttttgtttcaagatttatatctccttttagcagttattgtagcgctggcttggtattggcagattctctcagtatttgtcttaaaaagacggtatcttttcatcatttatgaagtttagttttgctggatataaaattcttggcttataattgttttgtttaaggaggctaaggatagccctccccaccccaacccctagtcccttctagcttgtagggtttctgctgagaaatctgctgttaatctgttaggttttcctttataggttacctggtgcttttgcctcacagctcttaagattcttttccttcatcttaactttagataacctgatgacagcgtgcctaagtgatgatctttttgcaataaatttcccaggtgttctttgagcttctcgtatttggatgtctagatctctgtctagcaaggccggggaagttttcctcaattattccctcaatatgtttttcaaacttttagatttctcttcttcctcagtaacaccatttattcttaggattggccatttaacataatccccaacttctcagaggctttttctttttttttttttttaattctttttttgtctttgttggattgggttaattcgaaagccttgtctttaagctctgaagttctttattctacttgtttgattctgttgcttagacttctgagagtattttgcatttctctaagtgtgtttttcatttccataagtcgtgattattttttatttatgctatttatttcactgaagattttctccttcctatcttgtatcatttttatggttttattaagttggactttaccattctctggtgcctccttgattagcttaataatcgacctgctgaattctttttgtggcaattcagagatttcttcttgttttgaatccattgctgttgaggtagtgtgatcttttggtgttgttaaagaaccttgttttgttgtatgacccagaattgcttttctggttctttctcatttgggtatactatgtcagagggaagatctggggcccaaaggctgctattcagattcttttgtcccatggggtgctcccttgatgtgatactctctcccttcccctggggatgtggctttctgagagccaaaccgtggtgattgttttttctcttccggatctagtcaccctgcagagataccgggctctgggctggtactcgggagtgtctgcacagagtcctgtgatgtgaaccatcttcaggtctctcaactgtagataccagcacctgagcgtgcttaattgtggtttggttttgttcattgttactagttttgtgttggttggcctccagccagtaggtggcgctgtcaagagagcatcagctgtggtagtatagggaggatcaggtggtgtgggggccctagagctcccgggagattatgtcctttgtctttggagtttttcagctgtcccctggggcctgcagcagcaatctgcttccttcagagggtttgtggattctcttggctttcctggtacgttcctgccgtagttcttggagcaaaagttaaggaggtgagtccccacacgctgctctgtccgtccgagtgggagctgcaaattagtcctgcctttctgtctgccattttccttgtgactctgaagaatatttttcccccaacatgggtttgtttctgagattctcataaaagtacatacttcttaaaagttgcattttcagttagtacatttgagattgttgacatttggattttattcttctgtaagccatcattttattattgaaaaagtttatttgtgctgaggtaaggtagcttatgagttcagagcaactagtgctaaaggaaggctattttgttgtttttttaatgagatgtgaagtattatagctcaaatattttcataagaactgtctaaacctctatttagaatacctatattcaacaaataattttgcaagacaaaaaagttgtcaaataaattgcctttttcattcttttgaatcttttgctaaatttagatgctgtaaaatgttgtttttatccaatcaaaaatagaagggccatgaaattattctttctacaatttgagatactccaaagtgcacttactgaatttcaaaattattgtacattgctctatatattccatttttgtctgtcacttgatatttttagaggttaatttcactgcatgcttacttgcaaactttgatttcaacaattgcagtttgccaaaaggttcaaaagctgacttttcaaaagacagttgtttgttgaaagttttgatcaaaatttccagctgattttgaacaaaaggtaacccaatcttagaggtctcaccaaaacaaaacaaaacaaaaggttccaagtcattttgcgatgcctggattggttttcaaagtagttttttgaaggctaaatgagttgagtgccaaagagaatgggtactgccatgatgaagtattcttaactttagtttaatttgttcttcgttattgtgtatatgaaaacctgtatttgtattaaaatcagaataacaaatagtgttcctcattgagcttttacgatattattaacagtagtgtttaaccttttaaggcaggattcagcaaaccttttctgtaaggggtcagacaataaatattttacgctttcttggccacagctatctattgcaactcaacttctgccttggtagccttaaagtagctatagacagtatgcaaacaaatgagtgtggctatataccaatacaactttatttatggagactgaaatatgaattttgtatacttttcatatatcacaaagcatcaacttttgatctttttccaaccgctgaaaacgtaaaaaccattcttactttgcaggccatgccgaaacaggtggcagggtggatttggcccgcagaccaatttgttgacccttgttccacgagttgaatgaaaaaaatagaactactaacggaactgatctcctatttgaaaactggcacaatctaattgcctgtaaagttcttccaagctaaaggagccaatatttaactgctattatgtatgtgtttaatgttcaggagaacatttaggggaaaaattggcttaattatgttagaacagtcatttgatctaaatgaacagtcatactttagaaagaaatgtgaatactacaattttataaatgcaaattctgcgattgcacctaagaattagttgtctttgggtactgccttcttaaaaaaaaaaaaaaaaggtggatatggctattttttcagatgttgtctggttttcatgtgcccactgatagcaccccaaccccacagggtgcacggcaaatgtggagacatgtgcaaattactatttactattaactttcttgagaaacggaaatgtagtacttattaaatctgcatttttattttttagttcattgctcctagaatggcttgtaaaatacaaacaatcaaaacaataaaatagttgtggatttacactatacatgacaaaatcattataatacaagctgtcagactaatattctatgtaattgcttcccatgtgatgccagcatgctttcttccgtcagagtgctggagagggagctgttagttatcttggacctggaaagggcccagaaaataggtgatttattcctggttgactttcagagttaacaacacattgaagtgtgaactctgttcgctgtatgtgtgtcttgcatgctactagatgagatggtgacagaagcaagacatagaaaaaataggttatttattaaactcaaactggcttattttaatgcaatagtgaatcataatatttaattaaaaatgaaaaatacaaagacaaaaccagattggacattgagacagcagttgtaagccaagactgttttaggcaaaccaagacatatggttgtcctatttaaatccataaaattaaacttttctgtaatttggatagttctactctttccttttcccattttggtcagcaaagtagccccctattaggtttctgcagtagtctcagatccacttagatctgtgatccccccattcttattctgcacactacgtttacacagccctgctgtgtgaactaatgagacccagttacagtcatgtctatctgctgcttaaaacccagcatggaccacccaggaatgccaccagtggccctctaactattgcgtgcaccaaaatcatcagtgtgtgagggtagttgcaaatttctggttccctcctagagattggtattcagtaagtcttgggaaagccctggtgcatcaaagttgagtctctgtgcatctcattactttgtcacttgccgcccccatccgtccctgtctcatggtccacccagctgttgtaggtccccagtgtcctgtttagtggacctgtctgtctttttccccacattctttcagcagctaaggagctgctgttgtacatctttctgttgaaattaaatttattgctctttgattccatttttctctagctgagcatcttgtgtgatagcagggtctaggtctcagatcatctgtattcttaacctgatgcctgaaacttgtagttactgttgagtgatggtataagattcaagttaacagtctttccattgtttctcttgtcatgaactgaaggttcagtgaattaaagtaggatttgtgtagtcacttcattgtatgtatcaagttctgcctttaaaacttcagttttctccaggatcaatcagtgtggtaatttcaaatttcatactttaaaaattgagctttagaacgggcaaaaatgcctcctaaacatttacaacttctgctgtcttttgaattaaaataaaaactgtgtctccctacagccaaggtagggctcaacaaacgaaagctgaaaggtgctggaagcctcctgcactttgggaatatacagtcaggaacaattgtcaggagttctgtagttgattctgtaggttgggattgccataaggttggttagaaaaaagatgtgcgaaagctttcctgagggtttttgcccttgctttcacatgtcccataattgaaattaagaactgctggcaactggttagtgaccagtgttgaaatgggaaaatattactggcttatgcttttgcttatagatattgaaatttaataaaatttaaccatagttacatatgattctatgaaattaggtaggctcttcaagaaaaatgtgagcaatgtaaggcagggtatttttgggaggggggtgctttattgtataggcaagctctcgaacagtgtctgataattagtagtgtctgacaatatttgctgaatgagtgaactcatggtaacataactccagtatggcagattgattcttggtgctttttttccagtggcaaacttttatagaaattggagagtttcgtaaagacttttaaaaagttgtcagaattacctattatgtcctttcctagataatcaatttggaaacaattgctggtaccttaagcccgatgtatgcctcctattatagtgttgaaaatgttcttttgacaaatgcatcaatgaccaggcacatgagaacagtgcacagctgtagaaaaacaacaatgaaggtcttcgacacaggagagagtctgcactgcatcacagctgatccgaaagttaaattcaatgaaaaggcaaatattttggtcaggagaggaattcttcctagggagtattagcacagtgtatttttagttgtgtggctatttatagctgcccaatggcttgcgtctgagtctttatttggtttttaggacatgctaaggattgagggtcgtgggccttaattgtatagaagacgcagttgcgtttggttgcctggaggcttctctgtgaagcctggtgggacacctgctggccagtttggcccttcttagtgaaggtgatagagacaagggcagaaggtcattgtatttataggatatttgaagcttatcttgtttactttgttaataatacttgagtcatttttctaaacattctttgcataacagcaaagattaaaaagataagtaatgtaatatattaggccctagttgtcattcacctgttcttgtagagctgatacttttttcttgatcaaattttaggtttaatcatatttagcttagaagagtggtctgtcttaagagtattctgattatttaggaacatctagatgaaacttctttgccttagtccatcgtttctcctttaaattcctaaaggcaggaatgagtgtttcttaaaaccaacatgtataaagcaacattttaggcaaactgggatgaggaaaaacatcttgaagggggcttcataatggtgttggagcctgttaaaaatgtggaatggaaagccgatcatgaaaacagatagtactgacttttggcaaaatgagtctttatgaaaacataccttaatgattatctgacaaatgcaagtgctttttgaggttaacagaattataaacaggagactgcagacactaaggtcactactgagcagcacgataattcgtgtggtgtgttctttttaaagattaacaatcttaagtcttttgtatgttatgttgctaagttatttgggggaaagtgttaaaataagtgctcttactttctttctccactgcttttgcacaaaaactttactgttcaaagaatattgtccattcagtttactttttatttttaagatgaagtatcccccaaactggtcatgccaggaaaaaaaaaaaaaaagtctcttccttccaaatttaagcatgtcagaaaattcttacttcttttgcacctgttaagtgccaggcacttaaaagttcaagggacatagcaggaaacagtactaatgaactgccttcatgaagctcacatgtagaccacaaacacagaaagaaaacacagtgtgtttgatggtgagatggtgtgacgtgctcaggagaaaacaggaggcagggaaggggatagaattggggggaaagggtggggagggaggggggcagttccagccctaccactaactagagtggactagctgggtgacttcatttaactctggaacctgttttctcatgactggattggcaaaaatataatacatgttcaacatacttcatagagttttgtgggtaagaggaatattattagtagtaacaagggccttataattgcacataggataactgtatttgcttactgaatcttcatagtaatgcttcacgctaattgccagtatcacaattcattctctgattaattcagcaaatacttgttgagtgtctgctaggcacgagggatatagctagattttagatacacaaaactctgttctcattctggttgagctatgactgaagagatgtagtgtcttatacctttcaccgttgctgtgtattttatctttaaatgttcagtttggtgacttttgtcaattaactagaaaagtcgatgttttagcgaaaaagtttataattttaatagagcttgtggtagggaactcacagtggttttattttcctattacttactcttggggctatttaaactagtaattttgtttattctataagtttcttaattttaaaagtattcatagagttcttttccttgtaagaatgctactgtatagccctaaaatttataatggttcaggagaactttggatataatacattttgtgataacagtgtggatcaagaagtagaaatgaaatatgccatttgataattgaaagcatatagttagatcgtgaaagccacgcactagaatttgtctaagttgatgaaatgctgactgatgaataaggtgaatctttcttcatttgggccagtagaatggagagatccatataatttggatatttaacaaaaattttcaagtgttaaaaaattatttgaaaaaatgtataatttgcattagccagtacagaattcttaactaacaagcagaaaatccaggagtactgctcattttttaaaagtttttgattaccaggggaaatataatggcaccgaggcacatggcaatgactaattaaaactgagcactagggtctgtggctctcgactgactagtatttgtgatttaatcatactgccctaaagatttgggcgctcacttgggtgggcatagttattacagattggcctacacgttccctttcagagccagaggacatggacgtcttatttagtagaaagtagtaatctgggtcttccaactttgagctctgtgctagttctgtaacctgggccaaagttacctttggttttcccatctgtaaaatggacgtaacagcagggtggtgagaatcaaatgagttaattgatggtaaagacttaacctagtgcctggcatgtagatatactaggtactttattattattatctatcatacaaagctgaaggattgtcagaaaagaatcatgagtgcttcaccatgttggagagcttctgggctggcaaatgtttaactttccctataggtggttaggggtgagcttttgaggtcttcattgtggcaggcgacatctgggacagctcctctcttgtgggtgtaggaagctggagtctgggggctctctctgtttaaagatctttcatgagtagaaacagacgatttgctcggccgtttgtgaggggattttcaggtgggcacgaggacctggctggaaaggaaccaccgtttaattcttcactgcattcgcagacgcattgcatccaccagcaccttggtaaaaagtcttaacgcaacaatccctgatcgtggctgtgcacgtagtcattcaggctttgtcagcctcatgttagaagatgcacatggctgtcattcttcatgtttaaacctgagaaactgaacagtcaaatttggggaatggtccaggactgaggagtgctgaatctaccagcccccagttgaggttcaaataagtgggggtgataatgatactaaccaaaaacagtgtggcattttacacccttttctatgtcagtcccctacttttatttatttctatagtgactttttgaagtaaccaggccagttgcttcttggtggtgtgtgtaatttatttctctttcccttgctcttctgtaaagcgatggcttcccctttgctcttagcagataacctgttgggtgacatctaggcaccaggcagaaatcccatttcccgttaatgtttcaacatgtggatttagcatctactgatgatccttgctgaatcttcagtgggtgttacaattggaagattttctagtcctgtcgttccttctgtggttaccaggtggaactattttgcaaggaagagctgtcaccaactggggcaaatgatgattcctcctaaaaaggcagggccagtcttccttccttccttccttccctccttccttccttccaatcttccttccttccttcctccttccttcctatcttccttccttcctccttccttccttccaatcttccttccttcctccttccttccttccttccaatcttccttccttccttccaatcttccttccttccttccttccaatcttccttccttccttccaatcttccttccttccttccaatcttccttccttccttccttccttccaatcttccttccttccttccaatcttccttcctccttccttcctccttccttccttccttcctgtttagatttaaatcaagtttacatttggtgtaaaatcattgattataagcaaagatttaacatttttgtgtgtgtatcattgtgggtttgtgatttttatttgatgattcaaatacattatttttgtttgagttgtacaatttttagccagtgggaaccctttctcatgggtttctttgttcttttttttttgagacaaggtctgtctctgtcacccaggctggagtgcagtggcttaatcacagctcactgcagcctcgagctcctgggtgcaggtaatcctcctgcctcagtcatttgagtagccgggaccagctaccatgcccagctaatattttaattctttgtagagaagaagtcttgctttgttgcccaggctggtcttgaactcctggcctcaagtggtcctcctcttgggcctcccaaagtgctgggattataggcatgagtcacggtgcctagctcctttgttcttttgacatctgcccatactccctcattagtcttttcctgctttttgacacagtaaggtagccaaggctcaccttatacttcctcatgcagttgatgacagtaattccgtagccattactgagcatgtacatttgtcaggtactggtttgtactttaaaagaattaccacattcagttctcataacaaccgcgagggtagatatttttatttttcccggtaaaatagaggacatcaaagttcagagagctgaagaaggtaacataacttatccaaagctaagctgctagatggcagagcctgcatctgaatccaggacttccaactgcggaacctccaaaccgttgttcctaatcactgccagttttggcagacctcttccttctcttcctccttctccttctcattcccctcctcctcccttcctctcccatttttagtaccaaggatagctcttaaagtatctcttgagtctcttctcagcttcactgctgtcttgcttcaggtgctggtttttcttttagattactgcatcgagtccctgtctcctgcctttcttctcccaatatccacattcctgtcaggaatatcttttaaaaaggaaacaaaacaaaacaccaggcagctgtcacctttgcgtacaggatagagcccatcaccgtttgtgtggcacactggctcctcacacctgtccccacacctgccccagcttctcctgccatgccacagcacacctgcgtgtgcagaacagcatggcaggcacctcttagctggcctcgtgtgctcccgtgccttcgcacaccttgtttcttgcttcttgggatcctcctcccactttgtaaaattttgttttcccgaaattcagcacagatgggcttctgtgaaggtgttgtcctgattctctgtgcagaggtgagctcctgctcgtggtgagtccccttgaagtgtgtgtactttgcacacgtgtccctgggggtgtagttcactgtgcacacacggcctcctccagcagggcagtgacaaagctgggcctgactcatcttcgtaggctgctagttctttcagtcagcagataaggtattgttaaccctcgagacctgtgcgagcacaccagtgtctggctctcctcactggaattgtcgcttagattcttatgtaatctgagtgatgccgtcttgcaggcatggctcagatcctctttaagatgtttcctcaaaactcagcatccgcagttcacatcaccctgtttatgttacgcagtttcatactagtcatgtatttaccccatcagatcaccaagtttgcacttgaggtttctccccagcacaaaggactgtgtacaccccacaggctcccagtgagtcattttggttggtgaagtggtggaggcgcttggtcacctgggagctctgtgtgtgtttctttcagtggtgtctagagagaggataaagacgccaagtcttctactatggcaggtgttttcaaatggcaaaatgctacaccacctggaataaaataacctcatgacactacaagaggagaaacaaggttccaaggcttgggggaagcatgtgccgttgagggcacacacacctagcaggtaagttgtcacacatcagtggcagcacaaggaaggctaggttccaggagtcagcccccagggtgacgtcgaaacaaaaaccagccaccccaggggtgtacatgaagcaccacacaccgatttaggtttggcctgtcctcttttggccacttgccttagaagtgtaaagagttaggtaagattaaaggaagaagtctacagaggcccctgataattgtcagccaagactcatgttgagagtcagggctaaggtcggagttcaacccgatccggttataattatgaaatatatgaatagggtcaatatgagctttcttatcaagtgttggaattctagaaatagtctatgtctagacaaggttgctttaggataaaatgagagaaataattatttcctggataatacgcttaggattttagattgactatatagatagattggaggatggtttatttaaattaatagatctgcaatggattctaaaaagagaaccaatgaaagcccagtatttaaccctttgaagtaaaatgaaagataattgacccttttctctattaatatcctcccatcaaacagtttaaaattttaatttttttagagatgaggtcttgctctgtcacccaggctagagtgcagtgttgtgatcacagtgtcatgatcagagctcactgcagcctcgaactcctgggctcaagggaccctcccacctcatcctctggagtagccgggattacaggtgcatgccaccacccagctaatttttatcagcagtttttaacctatttaagcccagggtcccttctggaatgtgccaagaaggcatagattctcaacctagaaagttgcacacatgcacccacgatttttcacacagtttttttccatttggtggaaggaccaggggaatcacaaattcatctgaaagttatttgtggatcttttatctcaaaaagttttctggactgtagcccacagttgaaaatgtagtttacatcacaatctacacgtaagcatataagatgaaaagcttcatagaatactaacctgactatgggcaacacacactgttctgttctggctcgttttatgaaatgattttatgacacactaaggggtctccacctgcagttagaaaaatgtagctctcactatgcagagtgggtagactttagaacccttgccttgtcacggccaagctcagtactgggcatctcatgctcggacgtagttcttatgctcattgtccatttgttgccaaggttgattctggctaaatgcataccccaggcagttagaaaagaagaattgcaaatcaacttctgacacattaaaagtgttatgatctggcccacattcatatagattatagagatctcacatgctcagcaaatgtgcctcctttgtggtcacagcacaggtatctaaaaacaccagggtatagcagtgaacaaaacaaacaaaagttccagccttctagtagaggagaggggcatcacatgagatcataaaatatgtcagactgtgataaatcataaggagaaaaaataaagcagagagtggggtatgaagaattgggataaggtttgaaattttagcttggatcgctgggttgttggtgtcactgaaaaagcgacctttcctgagtgaagtgaagaggtcggccggatagataattgcagacaggactttgtaggcagaggccatggaagtgcacagtccctgaatgagacagagcccagtcgtgtctggcgaggagggaaggggacaaggggccagaagggcagtccacacatgtccatgggaccttttggttgtgccaggcagcctgagggtggcagggtagaagcaggggaacagctgtgaggacgctgttgcgacagtcggggccagaacaatggtggtgtggtcctgagggatggcagcgggaagagcgagaaatgcatgaattctggaaagactgaacctgggtgggaaagaaagaagagagcccaggatggccccagcccagaactctgatggggaagactgagatggagtagcttggggcctggggggaacttcaggatctcaacttggggcaggtagaactttgtgaagccttttacacctcattggaaaagtcaagaagataatagaatcattagttaacaatttttgcacatttcctcactaatttgaaagagaaactctaacctgacctggtaagtatagtctggatatttttgtccatcactgtctcatatgatttttaatgtggggctgaattcctggcagttcctttctcagccagccgggggaagtccacagaggtgagagaagccaacttaagagaaaggcaacttgccttcatctttcagtggtcatgcgtggttcagtgttatagtttgtggccttttacaattagaaaaacacaggcttttttcattgtaaaaattgagttttttaattggtgaaatatacgtgacaaagtttgccattttaaccattttctgtgtacagttcactggcattaaatacattcacactgataatcaaccatcaccaccaaacatcgccagaacttaaaaaaaatgaagttttgcattgagacacccttcccaaaagtatttcagaattacccaaatttctggtgaaaagttttacattaataacaatgcgtttttatatacacgagagtaaacatcgaatttaagggtagttgcaaatgttgctctaggggaggacttcccttcgtggggcaaaatatgctgaaattcttgagaaataagtctaagagactcttactagactctgcctttttctggtaactcaccctttagcaaacttaaggtcttctttgtagctttgtaggcctttgaagtcccttcagaacaggtagatcgttgaggactatttgttgccggtttggtgtgtgtggatgctttctaaaagtctcctgataggcaggtctccagggcatgacctgtgctcacagtaccacctgttcatggatctcttctgtctgtttcaatacaatctgtcattggacataagaatattgtttcttgccatgcgcttctcagaaagctctgttgaattaagatgtgtcccaggtcttccatttaactttacagggaattatctgatgattgctgtgttccttgaacccttgctgaagaaattaagtcagcttttgcccatactcacttctcattatgcctgttaagaagaaaaaccacctctttgctgaaatagtgatttaaagacgtggatttgccaagttggattgtatcctttcagcctaaaggtttttctacccgcccccgccccatcttgtcccattgacttaagcttctgtatcgcactagttcaaggctctgcctccttcacttattttccttgcccttcaaaattgtgcttatttctgaatgcaagaagttcaactaggagccttgttcatccactttctttcatttccttttatcttaaaatatacttcttgtccagagtgaggctttaaaaagatttttttggttgtatttaaaaaacccacatattttcctagaaaaattcaagtagtaaagaggaagggaaactcggaaaaatctaagactcagtactaaaccaccgtttgatttgattattcttctaggttattatcttactgacatgtaataatggcgaacacaaacacagtcctggcaggtgtcaggcactaaaatgtttcacacccaaacacttccactacttgtcacagcagccctctgagggtcagcactgctattgtccagccgtccagtcacctggatgagcaaaccagagctcacggagcttaaggaacctgcccagagccacacagccccagccacgggatcgagcgccaccctggccagcctgtctgggcaatccctcttggctggcatgcttattcatcttgtcctgtgacctgccttttgtttggttttaaattcaaggatatgctgcaaatcttgcagtatttatgtacagacttgcaatttaaggctgtcagcttgaaggtggagagtgtagacttgaattagactattagactgtgtgagtttgaatccagctcttccagttactgctcccttgacagagtgacttaacctctgtgccccagttcctcctctggaaaaaggggaagacagaaatgatatctttcatagggttttgcaggaattaaatgagttaacagaggtaaagagcttaaaacagtggttgccacataaacactgggccaatgttacccaggttaaatgtcagctacctgcaggggtctctgctcattctgggctggttcatgactgatgggtttgtgagagtatacgtgcttttagagtagtcctagagctagaatcatttgtacacattttactgatttgttatttctttaaaagcctttttcatgggaaggttttattgttggtttggtggctggcagttcttttactaagctttccttcatgctctctattttgtgatattttcagtgagtcacacagcagagacatgttctgtggaacaaacctatccttggattacaacagacagtgacattttctttctagtgtgagctcaagtctgtgagctgtgtgcttctacttgtagtcttttttttttccagtaatggtcattgcggattacttgccattgtgtaggtaggtcagctgcccggggtgccttgcttaaaccttctcagtcctgagttggttgcccttgcatcacagaagaagaagtggatggagttatgtccctgccacggtcccctggcagagccaacggtggtctccagagcgctaccacactcactccctctgtaaggaaagcacaatttaagggtggcagccttgcctttgactgtcccaggaaaggggattttgactgtggattctgtccttaggtaattagattattttgatgagtgctagttctgcacacttgctaaagttttagggactctgccttacttaggagataattctgtcttgagataccccgtttacagaatgctttctaacttagatgtttggtgaataagggcatctgtttgccagcaccagctctcctggctccctgtgctggttttctctgaacacctcacctgactgcaggcagacagctctgagtggctgcctcgtggctagactagtgggatgacttttgccaacacaaacacagttcataaggatctttttttgtctttttttttctttttttttttggagatggagtctcgctctgtcacccaggctggagtgcagtggcgcaatctcggctcactgcaagctccgcctcctgtgttcacgccattctcctgcctcagtctcccaagtagctgggaccacaggcgcccgccactacccccagctaattttttgtatttttagtagagacagggtttcaccgtgttagccaggatggtctcgatctcctgacctcgtgatccgcccgcctcggcctcccaaagtgctggaattacagacgtgagccaccacgcccagccagttcataaggatcgtaagaacaagtttatacttccagcaaaagaaaaacttttgaactgtgactttagtgttaacgtttcgttacgtgtgtaatgcatatgattgttaccaccggttcttgccatccatattcccctcactccccccttctttccctccccattctcctaactactatggtgaagctcctgatagtgtagcatgcaggtgctagcatatgggaagtgagtctccagttggggagcttgttagcaattatattagggttctcttagagggacagaactaataggaaatatatatatataaaaaatatatatataatgtatattgtatatcatgtatatattacatattattatatatattttgtatattatgtataatatacatatatatcatatatattatattttgtatcatattatgtatattatataatatataaataatatatataggagtttattaagtattaacttacacaatcacaaggtcccgcaatagccagtctgcatgagaagcaagaagccaagagccattctgagtccccaaactgaagaacttggagtccgatgttcaagggcaggaaacatccagcatggagaaagatgtaggctgggaggctaggcctgtctctccttttcacgtttttctgccactttatattcactggcagctgattagattgtgcccaccagatgaagggtagatctgccttccctagcccactgactcaaatgtttatctgttttggccacacccacccagacacacccaagattaatattttgtatccttcattccaatcaagttgacattcgggattaaccatcacatcaataatcaagacagtatagaaagtgagactagttcattaacggcagttacttatttgatgcagaggatctaaaaatatagaagagttaaaacataaatatcaatgaaaaaatgtgatgctatgagcaaaatgggaagcctatctgtgtcctttctggctatgtgtatggcgtatacggtgatgcctaggttaccattctctggggtgtgcacccaggcctgaaaggcactaagtgcaaatggagtcgttaactgtgggcataagttgtctcagggccaggctggtggctggggaggaggtggccccaggacttcttattgaaggttggagtgtcatctgcccctaagtggcttttgtggtcacccagataatagagccagagatgctgtccttggccatgtttgagctccacttccccgcatcagatgttttttgagggccaagagggccagtaaatcatggtctgccttttctcaagaagtagggggaagagactgtaggacaggaaatggaaacctgaatcctaagacatagtccacgtctaatatgatgtctaaggctatgttttcatgagtaaagctgtcacaatattttcctatgttgaagttatcttaacttcatgggattgctccttaaagagagtagattttaaaagctgttcttcttgatgcccttggaagctgtcacatgatccagtttgttgccattgcgcagtactgtatctgtctctttacatgtgcttgatacagagtgacttcctgcttgttgtttgtccttaggcagtttgacttctccactcagcaagcctttaaagcacctgggttatgatgcgcatggatctggttaagttacaaagacccatgaccatctccttaaaatccagcatccagtacaaagtgtacattccccattcaatcacatagtcatttttataaattcatagccctggtcctaaacaggaagtaaagggaccctgcctcctccccgacccctactccccagaaaccagaaacaaaaagaactgtcagactcctggatatcttgctcttgcgggtactgtgcaggtctctgtgtgtgccaggttctgttgctgttttaacgtcctacgtaaataaacaaaacaccctagaatgaaaagtaacaagtcacctccttccctgtaatcgcccctgatcccctggcatagtctgtaggttttagctttgaaataaatatttgtttgaaaaagagagaggaaagtgctgctgtttcactggagatattttcgttcttttttgagggggtgggatgagttaattctgaccatggcttaagcctataaagtaggctttaagcccatgacgtggccatcagctctgcctggtgacagctcaccctacaactttcttttgtggagagtaatttttacctgagccttataaacataaaacccatagtaaataataaatattgtgatatttattaaaagagtattccctaaaagtaacctctgaaagagctgtaaacatgatctaataaacaatgatctcaaagctccctacctttgggggctgttaagttaatgtgaatgcccactatagctattagtgtgctaggtctacaacattttcacataaaacactttagaacagttaattaatttgcttatacttagtttgtaattcctagactatttcctcatttatagcttcaaagagaaactctatggcagtaattttccaggtggtccacttggttaagaatatctcttccctttctcaaagaactaaaattagaactgtcatttgacccagcaatccctctactgggtatctacctaaagaaaaagaaatcgttctgtcaaaaagacacctgcacatgtatgtttattgcagcactgttcacaatagcaaaatcatggaatctacttaagtgcctatcaacagtgtactggataaagaaaatgtggtacatatacaccatggaatactatacccccataaaaaagaatgaaattatgttctttgcagcagcacaatgcagctgaaggccattatccaaggtgaattaatgcagaaacagaaaatcaaataccacattttcacttataagtgggaactaaacagtgggtacgcatggatgtaaagataggagcggtaaacactggggactccaaaaaggtgggagggagggaagggatcaaaggttgaaaaaactacctgttgggtaccgtgttcactgtttgagtaatgggttcacgagaagcccaaaccccagctttatatattataccattgtaacaaacttgtacatgtagtccccgaatccaaaatcattaaattatttttaaaaagactacctcttccccttctttgcctcgcttttcgtggcaaaaatagaaaaaatcgagtcacataatttcttgttcttttggaattaaaaaaaggtcactttacactcaaaaagaatgatccttccaaaggaattaacagctaactaggtattgtttgacatttgcatttggtggcattcttctctaagagatccttgctttgatgcagctggttccagttgcaaaatggtatttcccatgagtgtgaaattatgaagagttgctcctagaaagccattttgttctacaagcatgtttaatcaagaaaataaatatccttttgcaaatttttataagcatgtaaggcatatttcttgcagaagctgagacatatttaatgcagaagctgatttcaaattggcttaatttttaatgcctgcattggaataaacctgtatcccatttcctttccttatgtgggacccaagaccttgtctcaagcacgagaaggtccagtttaagtaaaattagtgtttctcaggagacgagagaggccctgataagatcctcaagttgaaacacgctaaaaccctagcaaattgaattgagacctagatatattattagaaagtacagaccctcaaaggtaaagtagaagatgttgaaggcacagagggagaaagagagatcgcctgagggtctgtaatgacactgactatggatttccacagtaatcatagaagtatgaagatggagctgagaacgtaactgccaacctagaatactttactaatgtaaaatatgattcaagaaacaaaatgaaatggacactttcaaacaagccctgaaatttttaccactggtggactcttgctaaaaagatcatgaaaagatattcttcaaaaagaaagaaattgaactcagaaaggcataagatgattggtgagcaaggaaatgggagatggcaggtatgtctaaaccacattagttgtacgaaacagtaatactgattttgataaaattgggaaacattttattgactaaaatttgtagcaacaagaagaagataggtgatcaggaataatattttatcctgtccttttattatttgggagggaaggaaataactttagattttaatagataagcatgctgatatggtttggctgtgtccccacccaaacctcaacttgaattgtatctcccagaattcctacgtgttgtgatagggacccagggcaagggggtaattgaatcatggggccggtttttctcatgctgtgttgtgacactgaataagtctcacaagatctgatgggtttatcatgggtttctgcttttgctgcttcctcatttttctgttgctgtcatcacataagaagtgcctttcacctcccaccatgattctgaggcctccctaggcatgtggaactgtaaatccaattaaacctctttttgttctcagtttcaggtatgtctttatcagcaacgtgaaaatgaactaatatacatgctaaagctgtaaggataacaactgaaaattacaaattataggaaggaagggccaaagaactatagaaaaagcaagagtgttagagtgaactccaagtttctcttcaaagaatcagtatgtcagtgtgttcagctctcttattctttgattctccattttaaagtttaacttcctggttctctttgcccccttgcctctagtttcagtaaacaactttcctgccagttctaatcagtagttcacatctgttcccctcatcacctgctgcatcttgagtcacccctggtcacctgctctgccctgagttactcctggtcacctgctccatcttgagtcatccctggtcactggctctgacctgaatcatcctgggtcacctgttctgtaacctcccttcccgccaaactactcatcccgccactcgggctcataccccttctgtctttaaaatagccaattggaattagcttagactgtgcggtccaaccctagccaataggggaatgacacagcagtaggggctccctgcatcaggcataagaaccccttcccctcccttttccaggtttattctcgccattgctccatctgtgagtcacacccttctatagaagtaaaaattgccttgctcagaaaaggaaatttatgttcgagtgctgttttcttgcagcaccaagtaacaagcatttgtttctaacgaagagtatagaatgaaatggtcaaaataaatacaggtaaaatgtgtttgtaatccgaataggtaaaaaaggattaaatttcaggtaaagatcagagatgatcagattggataaaacataattttaaggaggaaagaagatgaaggtggtcattgtacagtgataaaatgtatagttctccatgaagataaagtgattttaaacttgtttgccttcggtagcatagtttcaaaatagttaaggcaaagccaacataattttagatctctagtcagtgtcagttgttgaatgacttctctgtaagtaactagtagattgatcagaaattacaaagatcagaagatttgaacagctacagttttaagtggacataaagaaccttacctttaataaggagataaattattttaaaatacaagagacattcaaatttctttacacactaggccagaaagcagttagtatcaacaaaaaacacatatcatactgtgttatctgatcacaattattagattagaaactgaatttctaatcttacgcattttggaaatttgaattcaatataacttgtgggccaacgaagaaaacaaaccggaattaagagtggttgtcaaaattttggagtcggtcaagtacccaagttaaaaatcagacagaagagtgaatacagttaaaggaaaagagatgtttttctttgttttctttaagaatgttaaagagaagaacagaaaataattccaaaacaaggatacagttaagaggatacaagtgcaaaagtggttatttatttatttttttaaaagtggcagtttatcaagtagaagaaagaagattaaaacattaggaatgaaaagaaggtcacatctacaggaatagcaagtatttttaaaagactacaaacaactgcatgccaacaagtatgagatattatagtaagttctcacttaacgtcatcaataagttcttggaaactgctactttaagcgaaaagacaatgccaagtccttgaataagatcattttcttcagtgtcattttattataacgttgatgagggaaaaaatggttgtattataaataaatttgcttaaagtcacagtttccaaaaacctatcaaagacagtgaggacttactatataatacttagaatataagcagttttctagaaataaccaagtttacccaaattgactaaaaaagagtaggagaccattcaataaatgaatgggttaataatctataccctctcactttgcgttctacccccatactaggcccagagagttcacggatgtattctaccaaacagtcaagggaatggattctcaaaattttacaccattatttccagagagaagaaaaaaaggaactaaattgatcctctagtttggttttattttcaagctatcatgaaaagcttcaaatttctgtcacaaataagtataacaaataattgtgaacccatcatcagtcgcctagcattaacaattagaatattttgccattagtgtttcatcgataatttctcacagatatctttttttgttcatttgttttaaaatacttgttgtaactgtagctgtgacctccttttcatttctaatgttttgtttgttgtttctggagtatgttaaaacaaatccaagccttgctaaactcatttattagttctcaaaagtttttttaaaaaatttcttaatttcttcctgcatactggatcataccatctgtgaataaagacagttttacttctttccaatcaatgtagattttgtctttttctttaccaagaatctgcagacttgctgagaatgaacatccttacttcattcctgggatctttggggaaacatcttcagtctttcacattaagtacgtattagctgtagggtttttatagatttccttatcaagttgagaatgttcccttttatttctaatttgttgagagttttggtcatgaaatggtgttggattttattaaatgctttgtcaatgactagtgagatggttatgtggtttttctcctgtaatccattaatatggaatattacattaattgattctctgatgtgaaaccaactctgaattcttgggataaactctgcctggtcatgatgcacaatcctatttatctgttgctgaatttggtttgggattttcatgtctgtgtttatgaggaatattgttttgtaggttgttgtggggttttttttttttttttggtaaaaaagattttgctgatttccttttcttctggagtcagttttggtaacttatagtttcctaggaatttttgcattttgtctaaattgcttagtttgttgacatagagttattcagagtatatcgtgtttccttcctttctgccaggtgtaggtagtgatgtctcctctttcatttctgatatgggttatttgtgtcatctctcttctttttttgggtggaagatcattctagcgaagagtttatcagttttgttgaacctttcacataacttattttttggtttgaagtatttttctgttgctgctgctgaattgatttatacttggatctttattgtttcctctcttctgcttgctttgggctgaattcgcccttctgtttcttatttcttcaatagaaagattagattattggttctttcacttcttttatgacataagtgtttaaaactacaattttctctaagcactacattggctacatttcataaattttcatgtgttgctttcattttcattcaattctaaatactttctaattttccctatattttcttttttgactgatggcttcttttttagaagtgtgtttttttaatttttaaattttggagagtttccaaaattgttgatttctaatttaattccattatggccattaaacacaattttctcttgtctttagcttttggtagtttgactattatgtgtccaggtaaggatctttttatatatcttaaatctttttaaaataacggagtcctgttttatggcctacattctggtcttttgtagtaaatgttctgagtgcacttggaaggaccattgttggatggactataaatttcagaatgagttggttgacagtgttcaagtcttctatatcattgccgattttctgttttggtctatcagttattgatagtgggctattgaaatatcaaactataaatgtagaattgtgtatttcatttctgtcagtttttgcctcatgtattttgaggatcatacatacacacattcatagttattacatcttgaaatactgaaatacttgaaatactgaaatacttgaaatactgactcttttaccattatgaaatgtttctctttgtctgtagtaatatttattggctaaaagtcttctttgatacccatacagtcacttcttatggttattgttttcatgtcatattttttcctatccttttactttttaccaagttctgtcttagaatctaaaatgtgtctcttgcagacagcatatggttgctttaaaaaaatctgatctgatcatttctttcttatttttttttttttcgagacggagtcctgctctgtcacccaggctggagtgcagtggtgcaatcttggctcactgcagcctctgcctcctgggttcaagcgattctcctgtctcggcctcccaagtagctgggactacaggtgcccaccaccatgcccagctaatttttgtgtttttagtagagatggggtttcactgtgttggccaggctggtctcaaactcctgacctcaggtgatccactcgccttggcctcccaaggcgttgagactacaggtgtgagccaccgtgcctggccttgatctagtaatttctgcatttagttaggagtgtttagttatttcacatttaatgtagttattgatatggttggttttagtttgtcagtttgctgtttttctgtttatctcttgtcagtttatttatcctttcctgctgcctcctagttaaatgtgtttgtttttattttttggcctgtaccatattctctgaattttaaaacttaatatttgaattattttcttattgattgctgtagggattataatatgcattttaatttatcgcagcccgcttgggattaataactaccctaattctagtcagtatatcagctttactttgtatctctccatctcctcccccctcctttttggtaatttattcatatttattatacagaatgtgttaaatgtgcatagtgttgtaattaatgctttatacaatgttatgtcatttaaataaagagaagaagcaatattcaaatagtcttctgtatttactcacatatttcccatttccagtgctttaccgttcttcccatggttttgcattactgtctggagtcctttcagcctataggactttatgctttctgtcaggcagctctgttgacaagagattttcatttatttgggaatatctttattttgctttcattttttttcttttttcttttaaaaataatttattcatttattgttatgagatggggtcttgatcttttgcacaggctggagtgcagtggtgtgatcatagctcactgtaacttcaaactcataggttcaagcaatcctcctacctcagcttcccaagtagcttggactacaggtgtgtgccactgaggtgtgtgccactgtgcctagccttgtcttcatttttgaagaatagttttgctaaatatagaattattgattgttttccctttggtgctttgagtatgtcattcattctgctttctgacctccatcatttctgatgaagagtcagccattatatttgtatatatttttattcctgtataaattatgaattattgttttccttgctggttttaagatttttatctttagcttccaccagtttaagtaatatatgtctaagaatctctttgtgtttatattatttgggctttgttgagcttcttggatctatacataattgcatttgattttatttggaatatttttagccattatttcttaaaatgctttttctgttccttctctctcccctctcctctccttagggtattcccattacatgtatgtctgcactgttgctgtttccccactctctgaggtttcgtttttcttacatctttttttctctctgtctcttggataagttctgttgatctctcaaatgttcactgattctttcttctgccatttcaaatctactgttgagtccatcattggatttttaaactctagaattattatttttttattttgatacacgctttttatttgttggcattttctatttgagtcattgtcgtcatgttttcctttagttcattaaacatggttttaaaaaatctttcaagcacaattaaaatagttgatgtgaagtccttttccactaaacccaaattctaggcaaacttagtttccactgactgttctaatttgagtatgactcatgcttttcctggtgttttgttttcaggattttactttaagttttgttgttttatgagtgtgtgtttatgtgtgttttaagtcacttgcctaggtgtaagttgagggatcttgtcctctctacattgaatgggcactgaattttgttctcttcatcactccctgtccccctttcttttagtctgactttctaggggtcactgttttagctgcatagtttatttgtgagccatgttttggtcagggattgtggacaaacatcttgagcccataaggcttccactccctgctgttggattttaatgtggattggaagtgcattcaaattttaggcaggtttcaaggctgccccaaaaagttttggattttagagcattttggattttggattttcagattatgattgttcaacccgtactatatcctcagcaaaaacaagagggctgatgtgtcataggggttcaataaatattgctataatggaagactgcagttagtgaaaccagactctctaggatccatctggttaggaggctccaacacactgaagggtctcagcattgcagcctctcacgtggcagacctacaagctagtgtcaaacctggagcctgcaaatattgactgtgcatctgtgattcgctctagtgggttgggattttttgtaaaatttatatttggccgtgtcctctccaccctaaatagtctcccctagatgagctttagaagaaatacaaaggggcgctttctcacaaaaactgctaagtacccctagtctgtctgacactcatcttctgatattcatgttacggctctaggaacctaagttcccactgacccctaatattccgcattggcattgtgacagttttgctgttaggagcctgcatcgtgaggttggaagaggtcctgcctccataacatcgcccaggatctctgtgcaggagttgcagtttgggtttctgaccagagctgttgtattctggttcctaaatgctttatctgtctgtcattggtctcagtatgtgtgcgcaagtgtatcagtgtgtggtttgagtagtcttttgtgggctgtggaacagctttgctgcatttcactctggagtggattttattcctctggtggaaatactcattcttgttagcagagggcttagtttttcaacactaaggtaccctctctgtgagtgatcatcagactgcagctgtgaaacctgtcatgacctttacaccaagagcttactatgtgcctggtgaattctatacccatttaattttggcatgtcttggtgttttgatttggctttttttttttttttttggttggtacattaggtttaaaagcgaacacgttggcagagttttttggttttgtttttgagacggtttttacacttgttgcccaggctggagtgcagtggtgcagtctcggctcactgcaacctccgcctcccaggttcaaggattctcttgcctcaccctcccaagtagctgggactacaggcatgtaccaccatgcctggctaatcttttgtatttagtagacacagggttgcaccatgttggtcaggctggtctcaaactcctgacctcaggtgatccacacgccttgacctcccaaagtgctaggattacaggcatgagccaccatgcccagccacaaagtttttataatttaagatatgtgaaggcttgcctataacactgtagttcctaactttgccgttttattatgaaaatagaactagatagaaaattcttaacctcaaaaatcctagtttatctatttttagtacctgaacagttcatcttggtctctatccatttcataaagccagacagtaaagcatagtagcagtgattccgattcagaacaggaatttctttatggcttcttcaagctttctgtttaacatttttggtttgtgttgtcaatgggaaataataaatgctttgttatcttttgaggtatctgaagaataatacagttgttatgaatatgtttttgtagtttttccttctcagttgtagcagctgtgtgggaaaagttctgtttatacaatacacatatatagacatgattcaatttgtgatttgtcaagtacacaaaagagcaagtggttttatttgtaccagacaccattctgcacttgttagaacaaaacactagcaataggacttgtcggtatcatttctacatggcttaacttttttttcactgcccatttcttagcatgaataagtggcttaacctcttaaatatttaaatcaatttttatttgggtaggccatgtaagaaaaaaagtggatagatatgataatgactactatgacttttagcaaaaggggtatatttaatttttatgcacatagaattcccaatctcatattggggaggaagagaataacaatatgttattcttctacttccttatgtatatactgagagacatttcattgctgtggtatttggtttccttatgggaaggaaaaattgggataatgatgatactgttctgtgcaatttttaatgggatggatagaaattcacgcttgttaataacttaaatcatagcatttctcctttgtttttggttagaacattaacttacatttaacactggaaaacatgactgtcagaaatttctgtaccttaattctacccacctgcttgaagaataaatggatgtgataatatacaattctgtcattattgaagaaattcagaaatgaagtttagcattcctgtggtgacatgttttattgtgaataggctccgagagcctggtttgaaaccgccaagtaggaacatcgcacaggggacaccttcacatgcgccgcagctgtgcagatttcacctcctgccactgcttgctcattctggttcccgccttctgcctgtctgtacctgggtacacatgtgcgtgtcttttgagcccccattcagttatttccttgtgttcattccttagctacattcccaaaccacagagtaagattgttttaaaaccttttggtgctcatcgttcagttgccctctaaaattcttcccactcacacactctcaacagttaaagaaggtgtttcttcacacctctgtaagccttacagacagaaaacggttcactttggtgaggttaaacgttactcatatttattggccatttgtatttttttttcatgaattgcttactcagaatttggtgggtattctttgtgttggccttactgatttgaaagagcgttttgttaataagccatagcctcttatttacagcttgtcagttttatttcatagcgtttcttttttatatgtacatgtgcacgttattcagtgtttctgttcagcgttggcgttagggttggcgaggccttccccactgtgtgcctggcaggaactgttgctctgtgctcctcatgggaagctctgcctgtgaggaccccacgctctctgaaaacccagctgcagtgttaggtgctgttggccagaagcacctctccattctaagactgatcccagactaagcgctgcctagcctcctttctgctaggtgcgttaaatgagatatggcttacgtacagtatgtgcacaaatcttaagtgtatagttggtgagcttgacaaatgtgtacacctgtgcaactaccatctccctagaggtacagaacattttcaccacctgacagtttctctgggctcccatcgccccatcaccatggataagcactgttctcatgtccctttccacaggtgggtttgcctcttctaggatttcatacaaacacagtcatatagtatgtacttgttcgtgtctgttttcatttgctgagcatggtgacgtttggattcgtctgtgttgtcgtgggatggtgagcagtgttccattgtgtgaacatacccagcatgtttatccactttgctctcagtgggtacctgggctgattccgtttctggttcttatgactaaagtggctatgaacattcttgcgtgggtctttctgtggacaaacacagaaatttcttttggcaaaaatacctaggagtggaattgctgagggaggtgtgtgtttaagaagctccacatggttttccaggggagttgtgccactcttgactctgacaggcatcgcaggagagtccctgttgtcctgcatcctagcagcactgacgtttttctttataattttagccactgtagtaagacttgaatttcggtatggtgagagctgaagaactttgctcttctctgatgagattgtttttgctattctatttatacatttgctgtataaatgttaagagtttcatggaaatttgtcagtttccatgaaaaagcctttgggacttgtgattgggattgtattgtatctgggtatcaatttgggaaaaattgacaaacaatattttatttgtcaacttataaatatggcatgtcgcccaatttataggtactctttaatttgtctcagccatgttttgccatttttgttaaacttatttctaatattttggctttttattatatggtaaatggaaattttaaaacctcactttcagtttacaactactatataaacatacatttgatttaaaaaatttgacatcatatctgtgactttactgaattcactttttctggttggttggttgtgtatttattttctgagaatttttaaattgagaatgaacactgatttttttcctttttccctcaccttttttaattatgaaaattttaaacatacaactaagttgaaaagttattcagtgaatgtttataacccactacaaagaatgtcgttttactatgcatccatccatcagtccatcttattttttgaaacattttaaagtaaatggagacatacccctaaaaataccttattcagcaagcatttcattaactggaattccagtttgttcatagtttttttctttttatgtaaaatttcctaacaatgaaatgtgctgatcttaaatactgcaaccagttgcttagctaaacaaatgcatatacctgggtaacctaaaagcttatcaagctggaaagctgtcagtcaccccagaaagttcattcatgtcccttcccagtcagtttccctcccacccttgttgtttgttgttgttgtttatacagtagtttttgttctagaattttcttttaaatggaatcatattacaaagtattttttgataatttataccacagtttggtcagtcacctgttgaaaacgtgtgctgtttctagtttggagccattaggaacagagctcctataaatatttttgtacaagtctttctgctgacatgtgttttcattcctttggggtaattaggttggggattgctgggtcacagggtaggtatgtatttagttttataaaatgctgtcagaccttttgccaaagtggctgtcccattttaaaatcctaccaacgatgtatgaatgtcctagttgcttacctttgatatttttttcattttggccattctgatgggcatgtagttgtaacttattgtgcttctaatttgcatttccctcatgaacggtgtgatattcatcacttcaaaaaatgtttaattgataagtaaaatattcagcactttttaatgtgctcactacacattcatatactttagggagtatatgttcaaatctttgccaacattttaattatacttggtcttttcattattctagaaactttttataggtcttagggactaggggctattgggatgaaatgaatatattttgcatgtgggaatgacatgaattttgtgggaatgacgtaaattttgcgggaccagaggtagaatgctgtgttctgaatgtttgtgtcctgccaaaattcatatcttgacacttggggattaacgcagtgccatcatggtactgggaggaggttaggccatgagggcgccaccatgggatctgtgcccttaataaagaggcccaagagagcttctttgtcccttccaccacgtgagggcacataaaatgtgccatctgtgaggaatgggccctcgccagacactgaatctgctggcatcttgaccttggaattccctgcctccagaattgtgagcagtaaatttctattgtttatgaattacccagtctgaggtattttgttatagtggtccaaatagaccaagacagaagttggtactgagagtgggtgtttcatagatattatctccccatctatggcttgtttgtacatctttcaacattttttttcttatttattctgtcctcacaatctgtccccgtcaacattgtttttgatgagaagtttaaaatttttttaatgaaatctttttttaaatcaattttctttctttcctggttattgcttttttgtgacctgaggaacttttgccttccccaaagtcacaaggatgacgttggtttgctctaaaaacgtcatcgctttagcttttatacttaggcctgtaatgcatcttgaatgaacttctgtgtatatcgtagtttgtggttcacttggtaacatatggatatccagtatcccagctacatttttccaaaaaacttgaccaaatagatttcttggggatctttgtaatcaaaaatcagttgtgtaatttagaatcataaatgaaaatctatttctggtgctctcttgtttcattgatgtctttgtagatacttacacaggtactgcttttccttgaaatctgttgctttatgatgttatatcttgaaataggttgtaggagccctacttagtacttctttttcaagattgctttggattgcctttcaagtttgttgcctttccttgtaaatgttaaaatcatcttgttggtttccacataaaagcttgccaggattatttttgggaatgtgttgtatctatagatgcatttgggggaaattttatattaatatttgctcttttaatttgtaaacatggactgtctttacattcatttaggcttgtaatttctcagcagtattttattgcatctattgaaatatggcttttctcttctattctcatagtatggtggattatattgattttgtaaaccttgcatttctgagatatgccacatttaatcatgacattttaattggttatatctttgatgtcagattgttaatactttaatatggatttttacatctgtattcttgagggatattggtccataatttactgtttttatctacctctttttttaagattatgttggcttcataaagcaaagtaggaaatagtctctcattttctgaaatgatttctataaaattggtattttttttcctcaaatgtttgatagaattcaccagcaaagccatctggggtttgatgtgtgtgtgtgtagaggtttgggagaaatttgtgtgtgtgtaacattttaatatattataaattaatatgttaatgtatattatatacaattttatatgtgtaaaatagccatatatgtatatattcatacttctgtttcatcttggtgtcagttttggcaagttgtatttatcaaggaacatgtctacttttacgatgatgaatttattggtataatgtttttcataatattttgttattttaatgtctgtaggatctgtagtgttattctcttatatttcgatattggtagtgtgtgttttatttccagactgttttgacttagggctatatcaatttaaataatattccaaagaagcatcttttggctttttaattgttatttgtattgctgttctaatttatttctgttcctaattatttccttatttctactagtttgggtgcagtttatttttctgtttttttcaagtagaaatttagataattatttttttctaaggtgaacatttaaaggcaccatttccctgtgaacattgctttagctggatcccacagtattttctaacattttttgtgtgatttcttctttgactcatggtttatttagaaaaatttactaattgcttatttatttctagatatgatattgttattggtgtctaactcccctgcagtcagagaacataacctgtaagatattccattcactcttttaaaatttttattgagacttattttatggcttaccaagtggtctatcattgtgaatatttcaagtgatttaaagatacattcgacagttggatataacattttgtaaatatcacttagtttaatgtgattaagagtgctgttgaagtctttagtgaattatatatctatcagttactaaaagagggatgttaaaattttcaactgagtttgtggattactttctcccttaagttctgtcagttttctttcatatattttgaagctgttgtattaagtgaatacacgtttagggttgttatagcatcttaataaattgaccttataataaagaaatgtccctatttatgtcttgtaatgctttcttgaagtttacttcggtaaacaccagcattaagaaaaaataaatttagtttcatgagagtctcctgatatctaagagtagttataatatttccatttcttttttgtggggtttttttttttttttttttttttgagacagagtttcgctcttgttgcccaggctggagtgcagtggcacaatcttggctcattgcaacctctgcctcccgggttcaagcaattcccctgcctcagcctcccaggtagctgggattacaggagcccaccatcatgcccagctaattttttgtatttttagtagaggtggggtttcaccatgttggccaggctagtcttggactcctgacctcagatgatctgcccgcctcggcctccgaaagtactgggattacaggcatgagccactgcacctggccttgtggttttaatagactatttttttaaagagtagtttcaaattctcagcaaaattgggctgaaaaaatagagatttccctataccctctcgcacgcccctacacacatacagcctccctcattatcagcattccccaccagagtgatacagctgttacacttgatgcatctacattgacacgtcatcaccccaagtccttagtttacatcagggttcactcttggtgttatgcattctatgggttagacaaatgtataacaacatggatctagtatcatgcagagtagtctcactgccctagaaatcctttgtgctctgcctttatgtttcctcctaccctctcttagcaaccagtgagctttgtactgtctccacagttttgccttttacaatatgttgtatagtttaagtcatatagtatgtagccttttcagatgggcgtcttttacctagcaataatatgtttaaggttcctctgtgtccttttgtggcttgatagttcatttctttttggtgcagaatagtattttattgtctgggtgtaccacaatatacttacctatccatttacctactgaacgacattttgatggcttcacaagttttggctattatgagtaatgctactatataaatatttgtttggaaagtttttataagttttcattcatctttcttgggtaaatactagggatcgtgattgctgaatcatatggtaagagtatgtttcagtttgtaagaaactgccaaactgttgtccgaagtggctgtgccatttgctttccatccaacagggagtgggcctttctattgctccacatcctcaccagcatttgctgtcatgttctggattttggacattccaatagatgtgtagtggtatctcagtgttgtattaattgcatttccctagtgacatattctgtggcacatcttttcatgtttatttgccatcagtatgtcatctttggggagatgtcttttgcccatttttaaatcagtttcacttgttaagttttaagatacctttgttttggataacagccgtttgtcagataagtcctttgcaaatattttcttgcagtttgtggtttgtcttctcattctcttgaaacaccatcttttaaattattatttacatagcattttcttttaccattcttttatttctgacttatctgtgtctttatgtggcatcatttgtagatagcatgtacttgggttctgtgtgtgtgtgtttttaatccattttgatgatttctgccctttaagtggagcactcagtccacttacatttagtataattgttgatagggtttgatttgggtctagtgttttatttttttctagttctctttttttggtttttgttcctctgttcctcttttccactttctttggctaataatattattgaaatttgacatttcgttataattctctaatggcttttagttatacttgttgatattattatggtttctgtttttgccttttttttagtgatcgttgtagagtagtgcttctgagtaatcactcaggctcagcatcgaatgggaacttgtttgaaacatgaattaccaggctgcatcccgggcctcagaaattctgtgggagagacctggcatttcatggtttaaataaaggtatcagatgcttctgaaatgcatgataaaaatctgttgtaccaccttatgtaaagcagaagaatcttgtaacagtataattcaattgagttttcttatttgtgctattgttatatattttctgtctacatatgataaaccccacaatagtgtttttgggattttgcattaaacattattacactgtcttacaaaattaagagaaacaaaaaatgagtatttatatttattcacaatttctggttctcattcttcctgtatatctgaggttccatcggtaccattttgcttcagcccaaataattttcattagtgtttctcatgacagaaattgttgggagacaattctccataggtcttctgcatttctgcaccttttgcaagcagtgcactggctgtgtttcttctagactactttttcaaggacattcatagagaagacaaaagtcatttctcctgccagaggctggagcaggcatgctcactatccatcataaaagtttgcctttttaagctcagggttctgctcctgtgacatcgtccattgcacgcagaggtgtcatcctctggggactgaggcacagcacaccggagcaggaacatgttggtaccctgggtactgcgcttgctcccagttcacattgatccatgactcaagagtctcttgtcgtctgtgagcgttcttgaaattgtggcaagctcacttgttagcttctgtcctccttgtggtttttctcaaagaggaggatgggagtctcatgggtcaatgggtgagattttaggaaaatccatgggatttgtagctgacatgttgaccaaattgttatcctagtgataaatggtccttcactttgctgcctgctaatgaggggaaattggggagatagttttaaacacagctgcccaaacaatgccctggttattgctaattcttctctgggtgggaggatgtcttcaccctttggtgggcagatggttctgacccttttcaaacagttaaaggagagaaattgataaccaccaggggtggaaagcaggcaaattgtttcatctgaatgttggctggttcttttgggagaagaaggggtgggacttgttaaggcagaaggctaacagctaggttgccacatggttggctcttccagcactggtcctgccaacctcagatgcactggtagatgacagtaaaaggcttaattatttttgtagtggaccctggcagctttagggatgtgcagccctgtcgaagattaccctgacatagacaaacacctgtgggaaaatattagtgtctaataagatcatcaactagtattccagctcttactgccccagatgaggtttccaatgctaatgatgatgacccactggagagtgagaaatttaacccaaacaagttgacgtacattcttgccgtccactccactgctctgggaaattctcccctggcccttccattaaagccacgtgataacccatgagatgttaccatgactgtggggcccgcattggtcaaaatggaggacataatcaatctgtgtaagcgacctaaaattgccttgtccctcttgcatctggcccttgcttacagaagggctgggtatgagtagggtatcattggtaaacaggtgaaaatagctcccgaaataggaaacatacaattttgtcctggtggaaggagagcaacaatgctagtacctagggaagtggggagtgcattacaccttgggaaattctgggacagggaacattaatgatccttgtcattcagaaccacccctagagccttcctcagggatgaaaaagccctggtgtggttctcccagatttttgcaagggactgaagtgaagctttcagatctgccattcctccttgccagaccactctggtgacgatttggtgcattcctttgacccatgcggagaattctatcagaagcagcaggggatggtgccagcgcctgcacctgccacacagaacacctgctagcacctctggctgtctgcccacccatactcatggccatggcacagatgagtgccacctgactggtggagcaggcaaacaggatagattggactgaccactgtcaggcagttcttccaaaaacaagggcaagactcagtgattgaactgagctgtagacctttaagagccatagccatctagaaagctctgttgaaggcactgtcagcctatgcccctatgatgcagggctcactggtaattgtaagcagcactttccaggaccaatgcaacactgagactgcactctccctctgtgaagggcaggtattatctcccttgtcttcctcctagaagcatagtgacttgcaccttagcagtgatcatcagagaactttgagtatgtaaagaaaaaaactccatcagatcctgtagtcctcatagaacagtggcaaactctccaaaatgagtctacccttgagtatctggggcagccccccagagggatcattgactcaccatgtgtgtgcatcctacaagtagctttccccactgtgagagccatagacatggtggtaggaaatttgtccatgacgttctctaaagtgatccataaaagcatctggaagcattcattaatggatgataggattgctgtagatttcctcctttgggccaagacacagttcgtgcaattgctaacacatcttgtattatccgtgtcagtggccccaaccaaaaggaaatgtccagaagcttcaggagaaagccacgtggcttgctaaggtggaccctgatgttttatggtattgctttagctggctgggtccaggatgccgggaagcatggttaaggtcaggattttagtttggctcatcatgataattggagtcctgttgatagcagcttttattagatgtgtgagacaaattgagtggatttggttccagcctgtattagattgatcagagtagctaatggagtggatactcagagggaaatttgacagaagccgagacagtataaatacaaggagtgggtcttgttgggagagagttctccagggatcttttgcatttctgtatgtctctggaaaagagagtgagcgcatttgtggtggactgtcttttcagtagtgttggtgtaagcagttagcctcggagacaagatagtgtctccaggccataggtaagtttgtttactgcgctgtaggataaagatgggatgtgggcaggcatgcccattataagcatttgggatccccaagctcagggatcctttcttgtaatgtaacctattgttccagcagtttttacctgactgtctttgtattgccctgtaggaattacaggctcaggtaaccggtacaagcaatgctaataggctgacagctgctcctgctgtgggtaggaaaagcggtagtccccgtttaccctttaagctttcactttccacagtttcagttacccgtgttcaaccatggcccaaaaatattaaatggaaaattttagaaactatttataattttttttttctttgaggcagggtcccactctgtcacccagtctggagtgcagtggtgtgatcacagctcactgtagcctagacctccttggctcaagtaatcctcctacctcagcctcccaggtagctgggattacaagtgtactccaccatgcccagctaatttttttatattttgtagagatggggtcttgctatgttgtccaggctggcctcaaactgctaggttctagcaatgctgccacctcagctttccaaagtgctgggattacagacgtgagctactgtgcccagccaattcattattttaacttgtgtaccgttctgagcagggtgatgaaattttatgttgtcttgatgtgtcttgcccaggacgtgaattgttcctttgttcagtgtctccatgccatagatgctaccacctcattagtgacttagtagctggttcagttatcagatggatcagagtgcatatagggctgggttttatccgaggtttcaggcattggcagggggtcctggagtatatcccccactgataaggggtgactgttacactgtttctctgatgaggactcttgtcttctgccagcatccatgaaaatgtcaaaaacaagttatagcttggtagtttgcaagcaggtaaaatctcagacccttcaaatttccttttgtctcttgcgaaaagttcttttagctcttattcttctgaaagtgtctttatttcacttccccctttctttaaactgcttttttgagattaactcacataccagtttacccatttaaattagagaattcagtggctgttagcatatacagttttgtgtccgtcaccacagttgagttttgtacattttcatcacctcaaaaagaaatctagtatccattagctatcatcttcctatttacccctgttaccttccccccaggcctaagcagccactagtctattttctgtctctataaaatggcccattccggttattttttataaatggcatcatgtatgtgactgacttcttttacatagcgtaaggtttttaaagtccatccatgttgtagcttgtatcagtacttcattcctttctgtggctgaataatattctgtagtatagatatgccacattttgttacttactcatcagttaatagacattcggattgtttctactttttgagtattataaacagtgctgctatgaacattcttctgtaagttttggtggggacaggttttctttctgttgggtagatacctaggagtggagttgctgggtcatatggtaactctattcgaggaacaacgagactgttttccaatgtggctgtaccattttacattaccacaagcagtacatgacagttcccattcctttccaccctcaccactacttaccctttttattacagccatcctaccggctgtgaagtgtacccgcattgtggttgtgatgtgcatttccccgatggctaatgatgttgagcgtctttccgtgtgctttactggtcatttgtgtatcttcttcggagaaatgtctattcaggtcctttgccattgttaaactgggttgtctttttattattgaactgtaagactttatatgtttgatataagtcccttatcaaaacaatttttttcctcccattctgtaggttattctctcactttcttggtggtatcctttgaagcacaaaagtttttaattttgatatctagtttaatccactttttttctttcgttgccattgcttctggtgccatatgcaagaaatcactgcctaatttaaagtgacaacaaattacaccgctatattcttttaagaattttataattttaactctttcttgtagatctttgaccaacttaatgtgtggtatgaggtgtaaaggtccaacttgcctctttggcatatggatatccagttgtcccaagattatttgttaaaaagattattcttttccccatggaatggtagtgacagtgttgtccaaaatatttgaccatatataagggagtttatttcagagccttctattccattaggctatatgtctgtagttccacgctgccagtttcatagtatattaattactgtagctttgtattaagttgaaaccagttagtgtgagttcttcaactttttcttctttttgaaaattttttgggctgttctcaattgttcttaccaattccgtgtgaattttgggattagcatgccagtttctacaaagaaaacaactttaatgttaataagagttacgtcgaatctaaagatcaatttggagagttttatggtattaacagtattaagtccccaaatccatgaacatggaatgtctttccatttaattagatatttatttcaataatgctttatagtttccactttataagttttacacctcttttattcctgttttttttctttttggtgatataactaagactttcttaatttcatatttggtttgatcattgctactgtatagaaatacaatgcagttattccattttaaaaattgatttttgtatgttgctttgtctcttgcaatcttggtgaacttctttgttctaatagtttttaatggactccttaaacttttctgtatagaagagtatgtcatatgcaaatagcaataattgtacttcttcctttccaattcagatacctttgtgtttcttgtctagtcactcagccaaaactagctagaactccaatacaatgttgaatagaagtggcaagaacaaacatcttgtttttctgatcttagggggaagcttttagtctttcagtattctgtgtgatgttatttgtgtgtttttcatagattccttttattaagttgaggaagttccctctatttctagtttactgacttcttttttttttttttaatcatgaagaggtgttgaattttctcaggtgttttttctgcatctgttgaaacaatatgtgattttttcccctttattctattgatgtggcatatgaatgttaattgactttcacatattaaaccagccttgcatttttggaataaatccttcttggtcatggtcatttttgtatattgcggaattcaatttgcgaatgttttgttgaggatttttgtgtctatattcataaaagaggtataggtctatagctttcttgtgatgtcttttgttttggtattaggtaaatagtggcctcatataaagtgtggtaaattgttttctaattactggaagagtttatgaagaacaggtatttttaaaaattttggtagaattcaccagtgaagctatctaatcctatgctttttttaagggaggttttgatgatcagtcttatataggcctgtttagattttcttggttcattttgactagtttgtatatttctaggaatttgtttatttcatctgagttgttaaaattattggcatatagttgttcatagtattttaattatttttatttccatatggtttgtagtaatgttccctctttaattcctggtattagaaatgtggatgtttatttttcttaatcaaaataagtaaaagtttgtcaattttgttaatttttttaaaagaaacttttggttgtgttgcttttaaaatattgcttttcagtttattaagttctaaattgtttcttttctcctgcttgccttgggtttagtttccttttttgccagtgtcctaagataaagggttaggttattgatttgaggtctttcttctttttagtgtaggtgttcactggtagaaatttccctcccatcactgcttttgctgtattccataagttttggtatgttgtggtttccaacttctcttgagacattttggggggaggtggcccattgattatttagcatgggttaatttctgcatatttatgaattttcccaacttctttgttattttcagtatcatccccatttggagatagaacttgcatgattgcaatccttttaaatgtactgagcttatcttaagacttagcatatggtctgtgctggcgagtatcctgtgtgtgcttgagaagaatgtatattctgctgttgttgggtgcagagttatctccttgtcagacttgcataatgtttccatcacaataattaatggagcagtttgcctgcccctggatgtcttattgctccttcacagtctgatgctgagatctcaagctatggctgcctgccggttaactcaaagaatggttttcatacctttttttttttcttttttttgagacggagtcttgcactgtcgcccaggctggagtgcagtggctcgatcttggctcaccgcaacctccacctcctggttcaagcaattctcctgcttcagcctcctgagtagctgggactacaggtgtgcaccaccatgcccagctaattttgtgtatttttagtagagacggggtttcaccatgttgtccaggctggtctcaaactcctgacctcgtgatccgcccgccttggcctcccaaagtgctggaattacaggcgtgagccaccgtgcccggcccacatttttttactagctggaaaagatcaaaagaataataatattttatgatgtgtgagttataaaattcaaattttagtgtccatagatagagggtttttttgtttttgtctttgtttaatgccatttcattcattacatattgtgtctcgctacttccttgctataagaacagggttaagtgattgggagaccagatgacccataagcctaaaacatttactctttggcagtttatgtaaagtttgccaactcctggtctaatgtgtccactatgacttccttatgtatactcagtctggccactgagtatgcctaaaaacggagcacacacctaccgttagctgcggaggctactgttgctcttcctctttgctcaatttcctgaggagggagggacaggatctgcctggggcctggcagcagcaggtccccagggatgctggccctgggggaaccagtggtacatggttaaggagggaggggaaacaaaagcagtgtgctccaccaggctcctgcctcggctctaaggaaacagaggaaagcaaacgggaatactctggtttagtatactgcccgcttctggagtggacattgatttaaggtgggttgggcaggaggcagggggaacattaaacatagctttcctacaagacataatctcattgccccttttcttttaaaactcttaaactatttctgcaaaaacgtcatctatgtggacttttccagaaatatgtcttttacttaaattgaaatacaccctcatacacaactattcacaagtgaaggagcaagggaaaaatcgctttcaagagctttccctgctatgatacggaccgcgtggactcgcccttggtgacctgacgttaattctgactctgtggagatctgtcagacgtgaaatcggccctgtgatgagctaaggtcttgctgttcctaatccttttttctcagaagcaataatatgtatttaattttaggctgttcagtagttaagggcttcagttttctatatctcaagtagatatactggagagttttttatttctttgagagcagagaaaatgatggggatggggtattctcccgttctctacgatcatcagcacttctactcattaggctcgagtatttggggatgttagagaaccaggcatgccacagtttcgcctgacctacctctaactgccagaaatgtactgacgttcttaataattgataggtgcagacctttgcgttcttaattaaagagccactccgtggctgtaggcctctgcccacaagatacagagtcacatgctgcccccaggatgcaagctgatgcttttatagtaactgcagatgtaataacagattctaggtatttcttcagtaacgtatggaggcactgtgtcacataactctcgttcatgtgagtagcggaagatctctcttccatttacgcttcagatgttaaggtagtagaatttgtcacggtgataaaacgtgcttacaaggcagggttgtgtgaattgataaatttgatccaaaatgtattggtcatccatttcaatgattaacagcatctccattgaaagatgttagtgtaaaattaattaaaaccaagatttgaaaataacctgatcgctctagactgttttattacaatcaagtatgatgttctctgttgacctttttagttttaattgagtgcttctgaatgatacttgtgatacagatcatatgtttctttgatggcagtttcacaccacagaaggttctcagcgccttgtagctcattgctgtcaccactccaggctgttgcctgggtgcccgctgctggaaccctgggatgaccaggcacagctgcagatgcctcgagctgctccagccatgagtgtggaaaccaactcggtggtcaggcttcaacacagaaatagcagagagcccctttcagtcacaagaaacataagtcacctaatgcatatccacacgttctcagcataaaaatttagcatcttgtttgacttactttcagggaaattgtccacaacccaaatggcctattactattttattgaggttgcagaagagatcattttatcatctattgtggtttttgctatttttgatgtttcctaatgaaacttgcacttttccccccaaattttgatttttttaaaactatttttttccttttatgaacaggttgaaaggattgttgacaaaaggaaaaataaaaaagggaagacagagtatttggttcggtggaaaggctatgacagcgaggacgacacttgggagccggaacagcacctcgtgaactgtgaggaatacatccacgacttcaacagacgccacacggagaagcagaaggagagcacattgaccagaacaaacaggacctctcccaacaatgctaggaaacaaatctccagatccaccaacagcaacttttctaagacctctcctaaggcactcgtgattgggaaagaccacgaatccaaaaacagccagctgtttgctgccagccagaagttcaggaagaacacagctccatctctctccagccggaagaacatggacctagcgaagtcaggtatcaagatcctcgtgcctaaaagccccgttaagagcaggaccgcagtggacggctttcagagcgagagccctgagaaactggaccccgtcgagcagggtcaggaggacacagtggcacccgaagtggcagcggaaaagccggtcggagctttattgggccccggtgccgagagggccaggatggggagcaggcccaggatacacccactagtgcctcaggtgcccggccctgtgactgcagccatggccacaggcttagctgttaacgggaaaggtgagtgtctagggagctgctcaggctccgtggtgatcccagagggctcgggtccttctctagagatcaggccttgagctgggcagagtccggggcttctcacggcatctgctggagccttgcagagatttcgccttctcctttcttcgctggaagcctttgatatttctcttaattcggcaactagttttttctgtgtaattcgccatccacagactgtgctaccacactgacttgctttaaacagtatctccctctaactaggttattaggtgataagtttttacagcaagtttctgaagctgtctacctttcttcacctctgaagtgctgagtcttgtctcgtgttaagcgttttcttctaagtgtggccagcattgatacagaagtgcaggttcttattttgctcatctgtgtgaatacccaggaatgcctttcagtgggagcgttgctaacccagcagagcctttgggagccgggctcgtttctctgttgtgatcggcagtgcaggtgccattgcttcccccgtcagagcccagtctgcctggcaccggtggtgtcctctgttttactctcatccccagccccgctcctgggttctgcagctgccttggttgtgccatgacctgtccatctcccaggacagcacaactgggagttcacatgggtggcttccttctcctcacttgccacactgtgccggccacagttttctcttacgaggcctcatgacttctcacctgctggagctttctaatagggcttcctgcttcctgccttctgacagctcccatcccttttcagtcattcttggacgagggtggtgtccactggtgcccccaccccattgccttcagtagcaggtgtgccctgtgtgtctgcgacctggcgctccgctgccctctggctcgctctctctgtcagcaccagggccgcacgtggtcccttcctctccatctgctcaggggcccccaccacctggccctctcctctctctcccttctgagttgtagtcttaaaattgtctctttagccgggcgtggtggctcatgcctgtagtctcaacactttgggaggccgaggagggcagatcgcttgaggtcaggagttcgagaccagcctggccaacatggtgaaaccccgtctctactaaaaatacaaaaattagccaggcgcggtggcgcgcacctgtaatcccggctgctcaggagggtgaggcacaagaatcgcttgaacccaggaagcagaggttgcagtgagccgagatggtgccattgcactccagccagggtgacagagtgagactccgtctcccaaaaaaaaaaaaaaaagagactccgtctctttacctgtgtgtgtctcctccaacccaagctcagtagaataatagcaaacaaaatacaatggtgttggtttgtttggggagctactttcctctaaagcgaagtgttcactaagacattctaaccgtcctgctttggtgcattcaacaggttttctcctcggcccaggcccttgtgtagcaaaaaagtggaatatgaactgaaatctggggtctccctttgacaggaaattgccatcttgccaatgtttttcagatacacacttgacccaaacggtgccttttccggcttcattggagcttgtgaacttgtttgcaggtttgacttcctatattgtttgacctcatggatacagttttctcttacttagttgtatgtgagggatcagagaagttcagaggtagaagggactcacttaatagcacgctctattttgcagttagggaagtcgagtccagagagaagatgatgttcatggagagaaccgaagccagaaggggaaccagagcgcgtgccttagtgcctccctggcgttcttcccagcattgcttgttgcctcctggacagataagcacctccgtcttcattgatgacttgggggccaggcacggtgctggactgtagtgctaccaaaaaggactgatgagctatagtccgtgggcttggccctgccctgctcctggttttgtatgacctgcaagctcagaatggattttacatttcctgattttggaaaaagaaaaaaatcgggaggaatatttactaacgtgaaaatataagaaattaagatttctgtgttcacacataaagttttcttggaacacagctaaccatccattactatgaatgaatggagctatccattcatttacttccaccaccaatcccggctaatttttgtatttttagtagagacagggtttcaccacgttggccaggctggtctcaaactcctgacctcaagtgatccacctgccttggcctcccaaaatgctggattacaggcgtgagccactgcatctgacctacttggctctttacagagaggatacctgatctctgctcttaggaggccatagatctgtgagcccccttttttgtccacaaaagtcgtgtgtgtgtgtgtgtgtgtgtatatgtgtatatacacacatgtgtatgtgtgtgtatatatacacacgtacgtgtgtatatatacacatatgtatgtgtgtatatgtgtatgcatgtgtatatatacgtatgtgtatatgtgtatgcatatgtgtatacttgtgtgtatgtttatacatatatgtatgtatgtgtatatatgtatctatatacacatgtacatatgggtatatatgtatctatatgcacatatatgtacatgtgtgtatatgtatctatatgcatatatatgtgcatgtgtgtatatgtatctatacacatacatgtacatatgtgtatgtatatatgtgtatatatgtatacatgagtatatatgtacatatgtgtatagatacatatatgtacagatgtgtatatatgtgcatgtatacatgtatgtatatatgtgcatatatgcatgtatgtatatatgtgcatatatgcatgtatgtatatatgtgcatatatgcatgtatgtatatatgtgcatatatgcatgtatgtatatatgtgcatatatgcatgtatacatgtatacgtatatatgcatgtatacatgtatacgtatatatgcatatatacatgtatacatatatacgtatatatgtatatatacatgtatacatatatacgtatatatgtatatatacatgtatacatatatgtgtatatgtgtgtgtgtatatatatacacacattttttgttttgagaacccttgattttcaaaacttcgagccaacaaggttaagagctctagtccttaacccgcacgtccagttttggttggagaccacctccaatgcgatcttgctggttccctctcgtgtgttagttctttcaaaatgaactgcagccctcgccagatccacattgcgctttcaccacatgtgaaacaattcgcaacaagaaccttcattcctttatatttcttatataaggaagataataatagcttccatttaaatgaggatttagtgacttcctttctaaaaaacatccatccacacatgtggcattggttaaaccaaaagggatgtgtaagcatagaatcttaaattattttaccttgttgtgcggagttgggaggttgggttgggaatgacagtatttttccaaggccctcaccatcatttttctccaaagctatgatctctacccctctctcacttctgcctgggcgctggtcagatcagccctgacccctgtatactgctgagaatataatcactagttagaggaaaatagaagctgttagggagcatttttaggacagtggtgaatgacatcccctgcggccttgatctaaatcaggcttgcagattaacgaggaggaagtctttctggaagaaaagcaactgcaaagctggtggagcccctgacagcaggcctcctgtggatttgggagggtcagttctgtcgctgccctggtacctgtgcagagaagagctttgttatactctgctagatcgtaagctccaagaaagcattttgtttttccagactaaatcgaactgtgcccagaatggtgcctgccgtgtagtcggtgctctgcaagtacttgtggatggagtgattccagtagaatgggtgcgcatggaagacaagggttgttgtaaggagtcatttgtggcctgggtcttttgctcagagaggagggaaggagagcaggaggggagaaatgctattgaaataacaacatatatggccagaaacacagacattccagaaagccctcgttcgccctctggcacatgcttcctgaatgaggagaagccgcgctgaagctctgttaggctgttggtccacactcagacactttttaagccattgtttgtttttactttctagactaattttagagctacgtaaagaaactgatttgtttttctaaaactaattgaagtagatactggtggagtcattgggaaacgaaccatcattcaaaacattaatcatatactgaaggaatatttttgccaccaaaaaccacagatatttgaatatctgtgaacccaaagaatgaatgtttctggagtattttcacacacactcacttttatagaataaccatatatgtgtttgctttttaattattttaagtatgacgcaaaggcttaaatgaatatattatttcactcagaaatgtgagaaattctaaaatttaggtgatgcagctagctgtcttctttctctctatcaatgtttaatggtaatttcttgctcttttaattccctaatgaattaatcctacaaaagaagtaattgcttttaaaaactggattatcgtaactttgtcctttcatggattcaaacatataattcatcatcattccgtaagtatgaaatttcagaaaatgctattagcaaacttaaaacaaataggtgtaaaccttatcagtgttgtgacatagggttggcttttggatttcatattgaagccaacagacctagtaggaaaatgactgaggaaatattaataccttagcacaccttgcatttcatgagcatttcaaccaaaggaaactcctaagagaaagtgttgaggaaaacctggctgcttctgaggagctggagtgtgatttcctctcagtaagaatatgagtagatgatccatctccctttcctctgtgattatcagggaagtataagaggcacagctgccctctaggaagaagccccagggctttctagggccttttatgatttagtctcagaaattagaacttaaccccagggaagattaacaaatcaggagaccaggccaggtgtggtggctcacacttgtaatcccagcgctttgggaagctgaagctggaggatagcttgaggccaggagtttgagaccagcctgggcaacatagtaaggaccccatcttcataaaaataactattttcctaggttttgaaggtttttgttttttttttttaaattatccaggcatgaggccaaggcgggcggatcatgaggtcaggagatcaagaccatcctggctaacagtgaaaccctgtctctactaaaaatacaaaaaaaattagccaggcgtggtggcaggtgcctgtagtcccagctactcgggaggctgaggcaggagaaaggcgtgaacccaggaggcaagaggttgctgtgagccgagatcacgccactgcactccagcctgggcaattgagcaagactgcgtctccaccaaaaaaaaaatccaggcatggtgactacatgccccctgtagtcccagctacttaagaggctgaggtgggaggattgcttgagcccagtaaatcaaggctacagtgagctatggttgcaccactacactccagcctattccacagagcaagaccctgtctcaaaaagaaaaaaaaacgaaaaggcagcagtgcccagaccagcgcccagaggtagcagctattccctggggccacagcaggaaacctccacttgaaaagagaagacatttgaagtcaagttacagcaaacaggcaattagaagtgtgtttgagggtttgatcaagaaagatttcagtttgaaaccccacaaatgattgacatgtcctgtatagtgggtccatgctagaggcttccacatgtgttatcttgcttattcttttcaagagcaaacccacttacacaaggaaagggtccagaagctagaaatcaaacgagaggggagtagtcctttgagacatgtagatgcacagcctccctcctttctaagcatttaataggtatcctcaggcagaatgatgtgatgcccagcagcaggtgggttcctcagttcctcagagtgagcatagtggtccgcaaacctgcgtgtgcttaaggattctagtgcagagtttcaggcatagagcccgtagagaagatgctcttgtccagctggagccagtctgcttactcccaggaatctttaaaaacatgcacaccataatgattttattttaaaacttaataaatctgcattattttccaatgattgatgtcgaaccaaggccctttccaagggagtgcttgcgtttgccacttggaagagccaaggacttttgaacatggattcattgcttggagccctctcttgtgtaaagcatgctcgtaatgtatcacttactgttaccactttggatttcttcaaagtagagcaaaacttaggtgtacttagaaatctgagtacagccctagcctttttgatttttctcattttctcacacctggttttgacaacagtttttagtctagagcctttccaaatcattcaatgtagttttctttgaaacatcagctccccttttgtaatcatcccctgttgtatgtaaaaatgaattaaatataacaagttcagctagccaaaaaagtgtaagaggaaggagagcgttccctctatcctcttaggtttgtggctggggcctgtgaattacagtggtgaaagacatattaacaggagaaaaggacatatacatttaattggtgttttaaattttatgttcccaagaggtctccacacaaaagaggaaaccccaaagaagtggttaggtttgagggctcatataccattttaacaaaggatgataaattgcggagaagttcctagacaaaagaaagtggggtttctaggcttcttgggggtggtaaaatgtggggaggtggatatacggggaaacaaatggaagacaaaggctgtttagtaaggtctgttgatgccgtctcggcccagtttcatctctctggtaatgaattgttttccttttcctggtacgggaaagtgggaatacctttacagacaggaatttaagccctttcaggcagcaatagagagttctttctgcatctgttgcttctcagttgcctttagctaaaaataatccgtattcaaaagtggcatattttagaattgcatattctgattcccgtcagaagtttagggaacgaaccctgccagctcttcagcagccatatcccgaggggaagagtcacgtgtgagctgtgtggagtcccgtgaccatctcactctggatagggaaccaaggtttctcaaggagtgttttccttcttattctgagagtccctgctgcagactttgagagttttttccctgcaaatgaagtttattgatgtcacagctccagaaatgttaacacacatcctgttgtaaacagaatgtgtaaatgtcatacatttttgcacaagtaatttagaagtactttgagcaaaatatgagttcactgttacctccccctctgaataccaaattccccagagagaacatcagtagtttgatgtgtgtcatttctatctttttctatgaatttatattcttttatatgagatcatactacgtaatttgttcttagcatttgctctttttatttaacatcatgtcttggagaactctctattttaagactcaaattatttctttttatgttttaaactttatataaatatgatttcaaacttacaagttgcaagaccagtacaagaaatacccatatagtatcccttacccagattcaccaattgtttacattttgcctcatttactttccctctcctctttctcccccatatatgtttatacacacatacacatatgcatatacatttttttcctattcgaggatacattttacactatttgagagttagtcggcaacttgctattgtaaacgataaaacacaaggcctgtaattgatttaaaattttaatagatgttgccaaattgctctctaaaaaagctgaaaagattgtgagtacatatttacctattcttaaccaacattttaatctatttttcagtgtctggcagatgagaaattgctatctcattgttttaattttaaaacaggaaaactgtttttgcaagttaattgactgtttgcattcattcttctgttaattccgtatacgtgtgtatatatatatatatatatatatatatatatatatatatatatatatatatcttgcctgtttttcttttgggtggtttaacttccaaaatgtgaacatttcgtgaatgtacctgtctttgcccagggactacactgatcttctctgcatgtttgagctgtggcgtgcatgcttgtaaagagagtgcctaaaaagaggtccatgattcagggtcctccccaccccactcaggggtgaggtaggactatctaggccctgccttaagggactagaaaacttccaattaatgtgcattaattttatggttcctgctcagttttgaatataccaaagtatatttcattactttgggcttatatgaagtacaatttaaaagaaatttagatttcttaggtcagatgacataaaaggaatatttctaactatagttcttgctccttttgaactttaactgatacaaggacaaagggggggaaatcacattttcagattaaatttgctcttgtcgctgcatgtgctactaggaattaagccctgttacaaatcctccttgtctcctctattcccgttagcattgtttttgctgcagtcaggtactggccttctggaatattcctccagtggcatgctgtaccttaaggttgggagcagctatatatacacagggtacaggctctctagcctcttccgagcatgctattctggtgcctttgttctgtcttaagttcctccaacattcatcttcctctttcagagaatccttgttttacagaagaggccgcttgtgaaagagagtgatttgatcaaatcactagcagaattggtgggaaactagactctacgttagaacctactcctgacttccatttagttctttgtactgtgtcacactgataagtgaattttttataagcgtaattgattttattaagtacacagtattactcaagactttcgcttctgtgtcaagtgagtgaaactgaacccacagtggcttaaacatacaagcaaatgaaatggcatctgttggctcatgaaactgaaatccaggcacagctggatctgtggcctgaagttaccatcattctcataccccaccccacccccagcctccactttttcagtcaggccatccttcccgcatggaagcaaggtgcccccgcagctctgggctgccaccctgacctctcagctgaccagacagaaaaggggcttctcttcctcctacgtttcaaggggtgaggtcaacttcatctaaactctgtaacctagaaggaaggggatgagaggataccccaggggaaagccagggctagtaacaatagaaatggcaatagaggccgggtgcagtggctcacacctgtaatcccaacactttgggaggccaaggtgagtggatcaactgaagtctggagttcgagaccggcctaaccaacatggaaaaaccctgtctctactaaaaaaaaaaaaatacaaaattagccgggcgtggtggcgcatgcctgtaaacccagctactcgggaggccaaggcaggagaatcgcttgaacccgggaggcagaggttgcagtgagccaagatcgcaccattgcactccagtctgggcaacgagtgaagctccatctcaaaaaaaaaaaaaaaaagacagtaggtactgagcaagcctggacaatcatactttgaattaatgtcatgttccagcgtttgggtggccctctgaaacagtacacagtcatcctcccaatgcagctgtgcccaagatgctgctcaccaggagactgagctgtgcccagctctgtacttcctctttttgaataggtgttcttcctccttttctagtcctatctttgggagctaggcactgcatttatctcctttttaatttgatatctcaccttttacacatcagtcacattaattacacaaatggactgtttatgaggatccccttggagaaggtgccagggagtccaattctccaaggctcttttgccttgggtgcagaaggtttaactaacgtggcttgagtacttagattggatggatgggagccgattccctagaacagtctgaaaaaataaaatcggatgtttttaaaatatccagggaaagatccagagtagatggacaaattcacttaaactttaaatggtaaaatggaagtgttgtgcagatatttcagtggtctttagaatctcctacattgcctagtccaattgtttacacacattaggggcttcattaacatttgcgtgtacatgagtgagttgttggaggaatttttatcccttctgcttccgttattagtgtttgtcttttaaaaagaagagtaaaaggaatggtttgttagggtagtcgggacaaattaccaaggcaccaagaggcactcctacactcctgccgccctaagcacttaggggacgtcctccaaatcagacgagtcagcaggcctgtgctcctgcgccatgtccctgctgtacgtgcacatgtccttttaagtgaagtcaatatattcctcttcacagctgcatcccagtgctcaagggaacttcttgagagtaagaaccaagacatttcgtcctagtttttctactacctgccacatggtaggcggccactaaactgtggagtggatgaaagcattttcttccgtgatggttcatcttaaatgtcttttgataattagcattttattgaaaattatattgttttatctgagcaaaatctacttaaagggttcattgaacttcaacaacaagtgaaataataaaagaacccacacgatgcacacggtggcttgccagggcttgggtgccggagggaggagacagcttctgtgtcctttctcaccagcagtctctggccccagtggagccccaggctcacctcccctctcccgctttgtgtgctcggcccctgcagctggagtctgctttacttgattcatgttacttggtgtccacacagttgctggctcctgagtatcttccgtggcttctgagttcctgaaacacattttcctcaggttttgaggcatctttttaaagcttgcttttagtttcggattcactctatgtcccatgccatacacccatcagccgtctgcctgggagagtttctggaagctccatgcctcttcataggcacgttgccatgtaccacatggcaggcaggtgtgactggagcttggcattgcagagcccctgacttccaggagctcagagcctggcagaatggatattcaagaaagagccctcgtttctgatgatagggtctgtttgaaaagcattgtggttgacagagccatgccacgctgtctgcagaccagaggccgggcccctcgcagtgttgaaagttcagccctgccgttgtgggtagtgctccctaaggcaagggcagatgccagactattgttaagaagattatactaaactgatccttgtacagccctgcttctcgtggagtgatgacaccgaatgaatgagataaactgtctctttttaaaaagtaattaccccgatatagtgaatacccatctcctccagtgatatggacctgatgtaattggctctcagtctaggatcataaatggcatctgccaaggcatccttaataggaaatattaagaaaacattttaaagcttatctccaaagtgtttgttactgcaggttattttctggacgatgtatttgctcttccgagcaagtggatttgatgctcaattcttccattcactgcgcccctccctgccctggcttttgggaagataacatttcacaatcaggtttatttatgataacatctggtctgtcctccctactttattatttaagacttgtttgtgcttaaaaagaactttttttaatgggaacacactaggttctcaaatatactttcagcccagttacctcagtcatagtcatctctcatttctgtctgcagtttaagttcttatttatgtctgtgcagtaaggagagggagcgtgttgccaggagaaaagctgtaaacggctttgggcctcatcgtacagctacaggttgtacttaggacccgtgttagccacttagactacagctgtgcactgtgtccccctcatccccaccccgacctccagctgagaaataattatcacagagtccatgcactgaaatggaggtgtttaatcacaagaacacctccgcagtgcctgtgtgatcggccgtccctatgtgagctgctgatctcagagacagcattaggatggcgaccactgccccagacggcccagtgctctacccctagcgtgatctgaactgctgaagtcagagaagtccacgttggataaacaaagccagcccagtagtaacctggctgtcacagtgaccgtgtgtccgtcttactgaacctgggtttacgtgactaggatgctgacacaagtgagtttgcgcatggcttgctgttctcttcaaccctctccagcctgaataggaatgttaaacccactcaggaattctcgttggtctaaaggactgtgttcattggtctttgacactccgtcaaccaacttagcggggttgacctgagccttcggacacgatgtgcctgtgggtgcctgcctctcctcccacgagacagacctgaactgtctcctcagctgctcagctgattgtgagaaatgtattctgtgacaaaggcaggccacatttcagcgtcttttctgaagtggcatgcttaattccgcaggggcagtggggggatatttagaagcagtcggtgggagaggatgaactgctgagtttgaagtagtgaaaggggaaatcagtcataaaattcatgtttgagaattacaccagtgaagccgttgactgcctgggtcagagccgaagggccatgtttagtggctgggagccactcgcccccagcactggctttctgcatgctgcacgcctcttatgtcaagtctttgcctccatttttgtaggacctcttctttttcattttttttagttttatttgttcccctttttattttatttatttttcatttgtttaaatgtatggggtacaagtgcacatttgtaacatgcatagattgcatagggatcaagtcagggcttttaggggatccctcacccacataaacatacatttcaccaattgagtaatttcttacataggacctttctactgtcaacagtaattgtgggaattgtttctacagtgatttaagccttgaaagaagtaacttcctcctagtaaaattgtaaaatcaaatggtaagatgacgtggtctctaaggaggagtgtctacagctttaattactacactgctaatggtgagagggttgtacattttatctggtaagagaaagtctgcctctcccatgggcggatgatatgacttttattgaatggaaaaccggatggagattatttttcatcttgctaatgtagttttaaattatgtattccatgttcacattgtaattgtagcattttcttgcatgacactttcagcaaagtttggtagctgtttcccatgcttggcattacctctaaaggtgaagtaacataagaattgtataggaataccatgagagcataacgtgagcattatcagctaggtgagtgcggaagatcacactgtttaattgctggattgccagcttctgacccttctctgggagtgcggctgcctctgtacctgcttcatgacagtacaagcgtgaaggccacaggagaaaaagaacaggaccacacagcccagaccagccttggaaggcatgacattgcgtacagagtgtatcggttgcttctgatttccgtgatttgaaccactcttttattatggacttcaaagggaaagtaagcataagtttaacttctgtgctttggtttttcagataaaccttatctgatgggacaaaaattctaaaactatggcagctatcaaaattgtcacagctttataacagcaaaccaagaggaagagtggtgtaaaaatagactcagtctgagttttggtttggtttcgttttatctgggggagaaggaggttgccctagtaaaatttctacttgcaaagtcttccacgtgccattttttctgttaatatgttctcagtgagtggtctaaactaaatgtattgtgttctattaatcactgtttacagaaatttgccatttaggaatgtatattgtgcagtctaatgtgtgcatttcccagttttcacaaggggttttctcatgtgcatgtaataagcagttccacactgggttttcttgattatagagtctgtgtaacgctgtgacagcctggggtggcacctcgccacaatcttcagagttgcacattactgtgtaacattagaaactgctgctactctgagctcaagtgagtcaggggtgcaccccaagagctggatcactgtagggccagtgggttaccaggttgtcctcctacagaaaggggagatggggggaaaacagaccaccctgctgcagttttagcctgcatttccatgagttatggaaggattggaagaaaagctgactgtcagagttttgctctaatacagcttttttgtgggtttttgtgtgttttctttttttctgagacagggtccggctccgtctcatccaggctggagtacagtggctggtgccatctcagctcactgccgtctccccctcccaggctcaggtgatccacctcagctttccaagtagccgggactgcaggcgtgcaccaccacgcctcactaatttttgtattttttgtagggatggggtttcaccatctctacaaaagatggggttttgcccaggctagtcttgaactcctgagctcaagcaatcttccagcatcagcctcccaaagtgcctgtaataggcatgagccaccatgtccagcctctaatacggtttttaagtattctcggatgctcaaaactgatcgcaaaaccggatttcaaaattactatatagtttttgttactgtatttataaaacttagcacattgtggcttttaggttgctgttatggtgaggtcagcttcctgtcttggattttgagtagcttttgccctcctctagaacatggtgtgttcagttagatgctctcccttgatcctttgctcttcagcatgtcctaaacgtctctgttagacagaaccatcagttccacagtttggccccccttgagctccgtgttctctaccaccccacttggtgcccataaggaaagagacacataaaagcccctccttgctgtcagggggctcatgggctgtcattcctcaatgtacttggtgtggacccctgaaatgccaaacacatggaaaattctagcaccctagttagaggaacactgcatgacaagttcttgtttctcctggcagctttgtaagtacccaggcattcccttgcagagatgggtgtggtccctcagtgattgtcctgggagccattcagaaccatagctatgggtgatccttggcagcacctggttaacctgatgggaaagggtccggaaccgggcaggccatccaggccgtgtagatgatcagagggtgcgagcacaggatttaggcattggtgtttcatagatggataggtggtatgtccttgggccctagtttgagaaacactgatctgggctgaagctggaggtttgttttagaaatttgcttaaggaagtatctaatttcactgtagtttgctcagcctttagctttgcagattaagctagctacttattgaaaatacctcctcagaaccctctcctcctgccccccacaggcaacctatatccttggctctccaagcttccagggtctgttttttaagcataaatgcttctacttttaaatagtacttacaagatcatacgtcacctctgagcttacgtctctctttccccattttctcccctccatcctgcagaaatggaactttaaattctgatccaggagaaccagtagcccacaggcagtcctttgacctcctgacctgctatgcatcctctgccctgcagcttctcacatccccaggtggaaatgctgtgccccttcatccataccgtggcacttcctcactggaggtcacctctcctgtgcatggtcacattctgcctgtctgttgagaggctccgttcttcgctgcgttctgcttacctggttaagccacaaaaggttctatgcttagactagacgtgggatttaaaagtttccatgttcgtgtacaggagtgtacaaaatatgcatgagcaagtggtcacagtcatagacacaccgtgccttggggggccccaggtcataagatggtgttctctgtatttcacctgacgcctttggttttgttgctctgtgagaatgagggcagtcttttaaaggaactcatccagaaagaaaggagaagcaagtgtgttggagagaagatacatttatcatgtcattactaagccctgtattaaacttattgtaaacactagggtaattactgactccctccatgtgaggaatcagggaagggctgctgtgtccaggctttccggcgtccgtaagtgctacctccagctattcagtagctccagccgaaagccatgccctcccctttcctgcatccttattatcagctctgctgctcaccattgccaccaccttgtccaagcaattgacatcagtctttattgcctttttccaatccatttctcacacaccaggaggattttttatagatgtaagtcatatattactgccctgcttaagggtgtgtcttcgctttctggtgtacttgagataaaattcatacttttttttgtttgtttttgagacggagtctccctctgttgcccaagctggagtgcagtagcaccatctcagcttgctacaagctccgcctcccgtcttcatgccattctcctgcctcagcctcccgatttagctgggactacaggctcccaccaccacgcctggctatttttttttttttatttttagtagagatggggtttcaccgtgttagccaggatgatctcgatctcctgatcttgtgatctgccttctcggcctcccaaagtgctgggattacaggcatgagccaccgcacctggccaaatttcatacttcttactgtggcctacaggaccctttggggctggcctttcattgcttactgggcttccaatatgctaggctccctccactttctggaattggccaatttctttcctcctgttttgcacatgtattcatatatatacatatacacacataccttttttttttttaatctggttgacctcttatccttctggcctcagcacagacggcacttcctgggagaagactccccgattttccccctccatctaaaacatagcgctcagccacagttctagttgcatgcttaatgtgttggtttctttacctaagctaagctgcgggaagttaggcagcacatatgtttatttactcagtctcacggcattagcacctggaacaacaccaggcagtgctcacttgctcaggtttgttaaacagtgactctgatttttgtgtctttgtcttgttgccagattaagttcttgtctgtggttttatggccagaagaggcacacataaatgaatgagtactctgcctttaactcccttcatactttctgctcttttccttctgtccaatttattaagcacactgcatactatgtgccatgtcatgaggttcactgggtgacccccatgggaccatgtgactgatttgtcctctgaaagccagtgcttgctgggctggggagaagccagttgcacaaaaggttataacataaggcaacaggtaagtgctctcagctgagcaacttaagagactgtgttcaaaggctcaaggagcgagcatgtctggttgaggtctgcagaaactatgaagagggaaaaggtgtctccgtgggcctggaaggattagtcgggtttttataaagcagcagtgttggaagcgatggtttggatagaaggcatgaagtgggtagtggagtgtttctgatggtttatacacctctagaccttacctgagaaaggatttttttttttttttccccaagacggagtctctctctgtcgcccaggctggagtgcagtggcacgacctcggctcactgcaagctccacctcccaggttcacgccattctcctgcctcagcctcccgagtagctgggactacaggcgcctgccaccacgcccggctaatcttttttttgtattttttagtagagacggggtttcaccgtggtctcgatctcttgacctcgtgatccacccgccttggcctcccaaagtgctgggattacaggcgtgagccactgcgcccagccgaaaaaggatttttaaggcagttgacagtttggaaatacagggatatagtgttctgtttttaaatccaagcgaagatgtcatgacaaactgaaatgaaaacatattaaagccagggttatggttagtccagtccagggtatgcatgccgtggcattggtgactgcaggtgggctgcagatttggctttcagctgtctggtggcatgtgataagagtgtgctgatgagtcagatccacagtgctctcacacatacatgcgcacagtagttgctccgtagaagtataactgtgcacggtaatgagacttgaaaaacagttttgccctaggtcattaggaaagtttttcctggtttagtgaacaaaatgtgtccgcaccactttcttcacaattgatacagtattcatggtactgtttgctaaagggggtccttggtttgtagccagaggcacaaaccacttttggtattggttctagggatagctaaaagcctcagagttcatgtcatagagcatggtgtttctaacccccgccccttagctttaaataaaatattagaaaagaatctataattttcaaaattatttaactttaaataacttcctaggttagttttaaacctttaggggttacaggacatccactttcaaatttcaccttccagtaagtaaaaacatgacttacaaatacagaatccattcatgtcaagtattcatttaactcagcgaaggaatcaaaaagatagtaaagttgagtcaaagaaaatgcaggagaccatgtgtaggcactgaaacaacgctgggatagtttcagagaaagagacaaaaccggttaacggcctgcagggcagccatactaacctttgctgttgtcttttctcctgagcaggtgtcatttcaatctctaagcaatgccattgatttatatcactctcagttttctaaaattgacatccatatggagctgtaaaatactctaaacagcgctaaacagtcaaatgaaggtacatggccataaagaacgagatgatccctggtgggagtggctcccagtgccccagcatgatgttgaaaagatacgtggtcctttcacctgtttccaagttgggaatttttttttttcctgaccattaggaaaaatgttgacgttggttttggtgaatctgatttgacccattcttcctgggagtaataggataacacggccgcttctcatttgtgtagacaaccccagctcatcatcatctgcacgtggcctggagggtcactgttccctgcagtggctccttgggagaggagtagcaccctgttcatcaaaagcaggtagcaaggcgcacttacagttgctgactggcaggggcggaacgccgtagggctttgtagccagggtaagaagtttgggtttttttcagatggtgaagggattgaagtggaaacatgatgtgtgctgattgacatttgacatttgattgtcttctcagtccattttcagatatttgtgagagaatatctgaaactacgtaatttacaaagaaaaggaatttttctttcttgaagtgatagatgctgaggagtccaggatcaaggggccccctctggtggagcctctttgctggtgaggactctgctgagttcccaggcatcacatggcgagggggcagagcctgcttatgtgccagctcagctcactctccccctcttcttatgaagccaccagtcgcactcccgtgataacccattcatgagggcagagcccccatgacccaattgcctcttaaaggcccctcgtctcaatactgccacactgggggttacatttcaggatgtgtcttggaagggataaatgttcaaaccatagcagctgctgactgctctgaggagagtgacttgccggtgaggtggactagcagaagtcatcagagcctttctcagagtccaggccaggctgttaatgctggtggcttgcagatgtagaccagcattactaaactcttaaaagtttgtttccctgggatcaaagctaacttggcagagaccttattgtgtcttcagaattttcttcccagtgctcgaaattcgagccaaggaacgaaaatctcttgaatgagggtaattttattaacactcttccttattatttaattaaaatttttttatttcaggggtggttttaagtgccatcttttaaagcattacatcggtaatttgctaatctgagcttctctcctctccacagcatgaggccctgatacatttagggcctctgttaaaaagcaaaaagtgtgtggcagtggcaatagaatcaccaaagctaaaatcatagagaatggtggctcgtagtgttttaaaactgtttgaaaagtgattataggattggggaaaagttgatacttccatctttaagcagataacagaaagcctggttgcatgactggcaaacaattttagatttaaaaacaacagcccttggctttaaaatacttccaccttcttccggccttccagggaactctctatacttccttactaggagggttatactggacaaaagaggaccgtctagtctagggatcagcacgcttttcctttaaagagccatttagtagatattttacactttgaggccagacggtctctactactacttaactccactattgtagcctgaaagcagccaaagacaacaggtaaacaaatgaacgtggcttacaaaactttattcacaaaaacaggaagcagcccagatttggccaggagcccttgttggcggagcccgggtctagcctgttggccacccaagttcttacctgtctcctcctaaccttctcaccttgggaaacataatttattaccatgtatgcctgagtcatagaggactgactgctctctctatggtttctcctctcctaggagtggactattgttgatttttacttggttcttgctaggctgggataggggctgcagtggagggtgggaacagggtaatctttggttgttctggtcttaggccctgtgtgtctcacctgtgggggtgaagtgtttcatgatttttttcttctgctcaaggagtgaaagagttcttttttttttttttttccacactctccttcctttggcactagtagatcaacagggtttgctgcccttcccccagaggccagagagagggcagggcaggagagtacggctccgtgcttttctcatgggggtggcacgtcctctcctctgtgcctgaaagcctgcttcacctccacactttctcattagcgaactgctacgctgtcgtgccagtccacacgcagcctcttgcaggtctttagaagctcagctgagtttcttactattatctgtctcttgtgttctgccgcagttgagacagtccacatggccccagctttccttgcagcggctcatctttcctcagattgcaggctgtgtggctgccttgcaacctcagccatcctgcaagttcaagaacagttgtaattgatagtttatccagctgtaaccagcgttttagctgtgcacgggcctattcttcattctgagctattaagctggttttcatttgactttggtttgcatagaacacagggtttgcagaatgggtttgtgactggggtgggttgtgacatggtttcttagaacggggcccacacatggcccacgcatagaggtgtttcagtacagcagtaacagcccggcacggtaccacagtgttcacagttgtgggaacagggtgaagagtagactgtcctccagctgggagagtaggcagggatgagtcggtgcaagtggacgagtccaggacagagctggcttctgagcctaggaggtcgggcacgtatccttgcctttattcactgtgccctgcctgtggtttgcatgtgagaacacacatctctgtcttgtgtgctggggctggcccaacctcgtagatcatgtttaactctgtgttgttaggcataaccacagtctactttaatgacagcagatgccccactgtttagtcacactgcaaagagcatcctttcgatcacctcccagtggaaatccatgatgatgaataaattcctagattcggatttgtcaaagatttgttttgttttgtttaatatttttgatacaagttgtcaaaccatcttccaaaacacattttaccactctgctctctagccagtgaacacattttgcttggccctgatattagggttgttttgggtgtttgataaacttatgtgttttgacattagaattgtaaaccaaaaatagcattctaagccctgcagcttggaatgtgaactgcctcttggccaaggggaccctaaagaaacctacataactagttcaggccataatgtgggggatgggggcagacacacctcattatacccttaccgctttggagtttagacacaactgactagcattaacattaaaagagaaatcctaatactgacagaacagactctgtagcaaccagataccaacttccaacctgagtcaggtagagcatcacatgacagataataggtgccctgaaggaagccaaagtattttatcccaaaatataacttgacatattctgcaatgcccctgtaaagctctcttgtgggggaaattttcattctgtagagaatctccttcccttaccaggtcttttccagagaggctgacaccttttcagctctgataagagacagtcaccctatatatgaagcctgctacctggagacttcgtctgtacggcaagaagcttggcttccacacctccatatctaaactcaagcatttctttattctggattcacctcttcagatagggcttactcttgcaaccaattgccagttaggaaatctttggatccacccatgacctggaagcctccccaccccgccaccccatcctgccttcctaggccaaaccaatgtataccttacatgtattgatttatgtctttgcccataacttctgtattcctaaaatgtctaaagccaaactgtaacccagccaccttggcacatgttctcaggatttcctgaggctatgtcagggccatgatccttaacctcggtaaaatacacctctaaatggattgagacttgtctcagatactttctagtctacagaatgattaacttgattgctttaaaccttcaggtttggagtggccatcttttttacaaactgcatacctctagccttctcttaggagatgacgctacatgccaaatgttttaaatttcaaggatagtctttatataaaatctatgtacttgtggataatttcctcaaagaactcatgagatgagaaactctcgactgaagagaactaaaaataaagactgagtgaatgtcacaaccactgagaacaggttttgaaaagttcactgtgaggtaaatgaagaccctgttctcatggtctgaaaattaattgaaaggccaacagaatgacgcctggaagggtgaccagatgtatcgggggggggcgggcagtttctgtcccctggcctgcctccccctctttcagtgatgctgaccattcacctttatctgagtggttcattccagccaagcagctgagcctgtgaggacagaggcatctctccattctctcaacagcctgtttctctctaaaataaaatcacatatttccattttcttatgatgcttcctaattccaaggaggtgtagtgtgtagtgatcccctcatgctgggcaggtaccccggatggaggcctggccacgtgcacggcccactgccacacctccacctctgacaggtgggccctgaggctgatggggagtccagagcaccctgcccaccagagaacttcagctttgatccgttttgtttttgaggttccaagtaagatttttctttaggaaggaaaaaatagctctgtatacaggggcaatgctaggaaaactgttgcttttctgtactttgtggattctactgagtttgtaacctgccctgtcttatcaaatcgtttgctttcatggttattccttccttatggttttggggtggttgagtgtctatgtgtgtgttggcttgttttcttttaaagaacctcatggagaaatttatcttagatcttagaagtaccagattgtcttttgaagtcataggtttgtttttgtcttagaatcttcgttttaatggcgtttccatccttgctttggcctctagaaacaccagaactgagtatgtggcttgcttttaggagctaaccacaagactgactgtttctgtgtggtggttctgccgctagcttcttgttggggtttgttagactttgagtagctttgcctttgtagttttaagggaggtctataatgtatactaatactaatacattgtaaccaagcatagagcctcattatgatagcagttgagacacagttaaaattaatgtaaatgttactcaagtttaaactgtttctctaatctccgatttacagatgaagtggggggcagaagtcagaagttaattgtcctttggtgtagtctgctgttagaatactgagaaattgatagaaatggcagcactgaggaaggattaaaagtatagatggcaagttttcattcttaggctgttgctgttggcattgcagggagaaggttgaagtagacatgatgatgaatatcagcaaacaccttgaacccctccttactctgggtaattacagatgtacttccaaatgaggtgtctgaagttctgccctctgtgaggtgaactaggggtggaaaattagcacttgaacgtcttagcttagaacacattggatgcaataactataggttgtgagctaattttctttgaagtagatgtttgcctgtagctactattcatgtatctacccaagatagtatcttcctttaatatctaggttttgaaattaacggccacacactgttaatgaaatagagaaattagattgtaattgatcagttgtcttatgaaaacaatagttgcaaaagccagttggttctgagagtcaggataaacatgaagaaaagtattgatcattcaatcccatgtcaaagtagaatcatttctgcaggaaatgtagtttttgaagatgtgatcaataataagatcccactgctggagaattataccatgtcgatagctatggttatttttgtattttcatttgtcctttttaattgttgttgttattgttaattctgccttattctctgcactgaaaagaaaggttgggtgatgttctgccccccccccttttttttggcactttgaggtgacattataacataaaggttgttgcttttttctctccaatatttgatgtattttcaaaggctttaaaaaggaaataactaaatttaaagtaccacctgtcttgtttaatttgctttaggaatttatccctatatgcttagttagaatgataggattgatattgcgtagtaatttctgatgtttttgttttagtttgtcaaaagtaaaactaaatagcatgaatttgcgtctgtaattaaagattgaccgcgcttgaataaagttttccattaacttcttcaaataatggagttcacttttaaggatttccctttcctcagtgtttttaactttgattctaaaatgctggttgtagggatcgctttgaaactgctttatctctgtgtatgttttgaagaactgagtaaggatgaacacttcgatttcctttgggttactaaagactttgctgcttttctgatttaggagtccaaatccccttaaggattaatgctctcagaggagctcagcacaactcaaaatgaagattaaaattgacacaggattcttctacacatagtaatctataagtatgggcctttatactacagaaccttcagacgtgggcaaagacacttgactgtctctagttgaaacctgcgctaactgtatagttttgcatagtttatggtgatattgctaattagagtgttttgttccagaagaccggaacaaaacaagttcaagttcttttcgttatcctactgtcagtcattcagcaaaatgagtgtctttaagagtgaggctcctgcacagaaccagaggcacaagcttgatgaggcctggatcctacactgggtacatgtgtggcctgtgtgtatacattaaaactgcaaggctggctggcatacagcagttccaggatataaaaaaaaaaagaagtaagagtttgtgaaggtattgtctctaagctaagatagcctcaaaattggctagagattcttgcacaatttatcattgataatacaggttaaataaccctgtctgaaatgcttgggaccagaagtgtttcagatttcacatttgtcagattttggaatatttgcattatacttaccagttgagcatctcaaatcagaaatccacgatgagcatttccgttgagtgttacattggtgaaaagtttcagcttttggagcattattcaaaaaaattcttcgagttttcaggttagagttactaacctctctccaacatgtaaaggattttacctccttgtatccctgtttctccatcccaggagaactaaagtgaagacatttaacaaggaaatagaagtaatcacagtccatgattttaatcttttccaatagttttattataattactaattaaacacattctagataatttaggaaactattaaatatagcttcaaaaaattaaaatgaccacatgatgcagcggttctatttctaggtatatacccaaagaattgaaagccgggtggtgaagaaatctttgtacccctatgttaacatcatcaatagctaaaaggtggaagcaacccaagtgtctatcatcagctgaataaatagacaaaatgtggcctatccgcagaatggaatatgaatcagccttaaaaagcatggagattctcacacatgctgcaatatggatgaaccttgcggacatggtgctcggtgacataaggccatctaaaaaggataaataactaaacagttccacttacaagaggtacctagagtaaacgagagtggtgctttaccagggcttggggcgtgggagtggaaagttggtatttagttggagtctggggagacgaaaagttctggagatgcatggtggtgatggttgcacaatagcgtgaatgtgcttaatgccatcaaactgcacacttaaaagtggtaaattgtatgctctgtgccttgtgtcacaataaaaaatgctctagattccatttgctaatatgtaggacttgtgaaaaatatgcatatacaatatatattatggcaccactggactataattatttaaagacaaagtccataggtgtccccagtgagacgggactctgctgccaagcctccggcgggtcatgcaaacagtggagggcgccgttcctggaacagcagtgccccagcagctttaagcagtaggagggataaaagcaggagtggttaaagtgaaatggcagagctcattaatcaaattcgttcagttttattgattgattgagatggagtctcgctctgtcgcccaggctggagtgtactggtgtgatctcggctcactgcaacctctgcctcccaggttcaagtgattctcctgcctccgcctctggaggtgggattacagtcacgcgccaccacatgcagctaatttttgcatttttagcagagacgggatttcatcatgttggccagactggtctcagactcctgacctcaagtgatccacccatctcggcctcctaaagtgctgggattagaggcgtcagccactgcacccagccaaatttgttcagttttaaattgcatgtgtgtgtttgtatgtatgtgtggcttctcagtaactgcaccagcatgatacatctgtgtgtgtgtgtgtgtgtatgtgtggcttcttagtaattccatcagcatgatacatccctgagccattcctctggaaaatggtggtcttcaatccagctgtaggcatggcaagaagggaaggtcagtttcagcttcagggtaggtgggtagatagataaataggacagagatgggtgtgttttaagcacagggcaggaagcaccaacataggtgcctagtgcgtcactttccacattttccctccacaggacatggaatactagtgactaagcctcgttttctctctctgcccaagtaactgaagctcaccacatggtggcccagcaccggccttctccccatttgtgaaaaccagtccacttgcccttcccgtaggttgatgccagaagtaacaagaggactctagttcgaagtccttaacatttaataaacaagaagacatattggggagttacaacagctcttgatctttttatgttttattttttctccttaagctggctcggaacacattttctgagccctggaagatctttctcagcccccacttcctaggctcagctttttgttattcctcgtaggtgggtgagctgtagacttccttgtgccctttccaatgcctccacctttgtgtcatatgctttttaacttggtatttaacccttcaaaggctggctgcagtctgtttgtttccatcctggcttttcatggtaaaccttcatcatcccctgagtatgtagtgtatttggccacctccgtttctttgctaatggcatagtacctcgacatgccatatactttttttttttaaccaattacattcaaaaaatacttattgagcaccaactgcatgcaaagcacttgagagtcagttagaatcccaactccataaagtcttcaccagcattccctgggaatattcctaacctccgtggagaggtttcttgtcagtaaccactcatttttccaccacttttcttttgctagttcgtttttcacgtaggtaccgttcctgcctctgtggtggcagctgggtatgacggaggctgcatttgtgcagcctcatgggcctgaatttggtatgagcttagcacccctcacctgctcagtgaccttgggcaggcgaggtggttaggcatcctggacctgaagttttcatcttcaggggattatggcttgggggttgggtgagacacctggtactgcccggccagcagtgatgggtccacagatgctggttgccgacccgttgcctcagtatctgtgtctctgacctcctgtgaccaccttgctctgaaaagccagtatgatcgttcactgggatttcccctcttgcttttggtgaagaataaaacaaagttggaaagagttatcaatgcatgggcaatgaatcctgaggacagatgattaattaatatgtgaacatttttatcttcctgaatgatattgttaaaaaagtataaatacaagcagtacaagaaccagcagttaaagtgtgtctacattggagaccatttcactgtgaatgggtgagcgtgtttccttgggtgcagctttaacgagcagcacggcgtaatccaggtggtgcccaccagtacgtgcttcagagctccctgctggttgccagatcctgagccgcctgcttccccttttatcattgttatttatctgtgttaattacctggacttgaacagtccttcctctgatttatgggaattgttactgctgctgcaatctcagtgttctgatctgaaccatttcctttgagttaccctgaatatcctgttttgggcctcgaatgtgcaacatcagcaatggacaccaaacacaccgacctgcagcgggtgcccagcctcggggtgcgtctgatcacacaccacggggcctgagctccacccagagtcctcgggtgcctgcaagtgtggcccagggagcttttttccccccttttattttttactatttttactcaacacttatgtacatattacaattattatgtacaatataatttgatatatatgtgcaatatgtaatgaccaaatccatcacttcagacatttatcatttctttattttggtaacatttaaaatctgctctatttgaaaatatacaataaattattgctaattttagtcactctgcagtgccatacgacactcagaacttattcctccggtctagctttaattttatatctgttaactgacctttgactcttctccccccacccactacttcccagcctctagtaaccactgttttactccctgtgaggtcaactttttagcttccacatgtgagtgagatcatgcagtatttgtcttaatgtgcctggcttcgttcacttagcatgatgtcctccaggttcacccatgttgacccaaataacaggatttcactctttttttaaggctgaataatactccattgtgtgtatataccaacattttctttatccattcatttgttgatgggcacttaggttggtttcatatcttggctattgtgaatactgctgcaataaacatgggagtgcagatgcctctttgacgtgctgatttcattttctttggataaatatctagtcaagtgattgccggatcatatggtagatttatttttgaagaaacctgcatactcttttccataatgactgtactaatttacattcctactgacagtggataagaaagagttcctcttctaacccggtgaaaccccgtctctactaaaaaatatttaaaaaaaattagccaggcatggtggcgggcgcctgtagtcccagctactcgggaggctgaagcaggagaatggcgtgaacccgggaggcggagcttgcagtgagccgaggtcgcgccactgcactccagcctgggtgacagagtgagactccgtctcaaaaaaaaaaaaaaaaatcaaaaaaaaaaaagagttcccctttctccaaggagcattttttagaagtcccctggcaatcccgttgcagagtcagggtgagaacccctgctgtcatgtggcacattgcacttgccacatctaatacaacattattgtgtgtctctaggttcacaattctgtggtttaatcaggctagtcttatttagtcttaggaaaatataattaattatctagagttgatttaaaggtacattatctcattaattggtacttttatctcaaaatagttatttttctttttaaagtcccctcactgcttttggcacttaattttttggagttgattctctgtgaaaagttagctatgaaacagaatcattttaattgcaggaaccttagcttacgttcttctctctgttgattttcagaatgctccctaagcctgtggagtctcaggtatttaatgttctcatttcgtggtttgccgttcacctgcccttctttatatttctagcattctcaagttatttagcagtttccaggaattatttgtatgtttcatggactaaaatgccttttacacctcctctgttctcaggtttttcttttgcttttaaagtgagtttaaagcattctctgaatgtggtctttggtagtaagcatttccatcctcactccccattgagctcttgctggttggtttttatgacatcttgaagcatatcattaagttggatggttttatttttagggccaggtctaaaacatggctgtgaataaattttttctcgagtcaaccaaaaaatgaacgacttcgatactgagcagttgaaagaaaacttacagtgagttctgctataatgtgatatatgtgatcctaaaaatcgccacactgcaaaatcatgcaataaaagctacagggcttatgggggaaatgagattagaggtacagcccacaaagactttgtcatggacacattaacctaatagaaacagtagcacaatttcaagtgtcaaatagttaagaaaagcaagtactacaataaatacgatacattatcttgaaaaaggacagcagaaatttgcctgtagaagtgggccttggaagggttgcagcatgtggctactgcgaagcaatagaaggactgcaatctgaaaccatgcagaaagttgtaatacctgatgtgggtgggtggctgtttgagtgtgttttgtgtgtgttttgtgtattcctgcctagccagtttcagctgggtgcggttgtgcattcactgactttctccagacaattgtgcataaatgtgtgacattcgcagtatactcagatcgttcctaatgtgtcacttgtttttacaacaaaacatgattgaagtcctgatggtatatcaatgtctttcttagagatggctaagaatgagcacatttagtgaactatatattgaatggtttataccagcttgtatagatttgttatgcgtctgtcctcattacaggagctattcttttttcttttttttttttttttttttgagacagaatctcactctgtcgcccaggctggagtgcagtggcacgatctcggctcactgcaagctccgcctcccaggttcactcatgccattctcctgcctcagcctcccgagtagctgggactacaggcacccgccaccacactcggctaatttttttgtatttttagtagaggcggggtttcaccgtgtcagccaggatggtctcgatctcctgccctcgtgatccgcccacctcggcctcctaaagtgctgggaacagggtgaagagtagactgtcctccagctgggagagtaggcatggatgagtaggtgagagtggacgagtccaggacagagccagcttctgagcctaggaggtcgggcgcatatccttgcttttgttcactgtgccctgcctgtggtttgcatgtgagaacacacatctctgtgaataagaatagcccggcaggagctattcttagactgattctagctcatcgttttcccctgtactagaactatgcgcttcatgtagatttataacatacaactagttaggtagatttcattcattattcttttcaaaaatgtcttagcctatctccctgctaaatcctaaccaccgagttttttattggaagtctactagaattagactagcctttaactcggagacccctatggatagagaactggaagtgaaggagttagagcaaagacacttttacaattatttgtaaaggatttatttaacacattatgaagaaaagaggtattgatgtttaaagcctgcatttacttccatgttcatatgaaacatggttcttcaagaaaatttgcagattatgtaatctgaataaaattataaggttttgtataggtgaataggattacgttcaatatatgtaaataacaatattttgaaatattaaactccataaacggagagctattaattctgtagatgctatagtccttgctttttaacttcagaccaaagacaacagtggtcattaatatccaagatggttaaaaacagtttttgaactctttttgcagttgagacccttctgccttgaaaacattaaaacttgctaactcttgattagacaattctaaactaaaatataatcggagaaataccagttaatctttagctagtgaagaataatatcccagacatttttgtctggattttggatgctgtagtgtagtttcaagtggtttcttgattatgtcaaatatattgtaaaaattcacaaaatagcaagaggataagaattattctatgtctctctcaccaataaagagccaatattaacatttctataatttacattcctaataaactcacatggaaacattgttgatatctgtctgtccacataccccttctgttatctttcatttttatttttttcatgtatgattttggggatgggcagtggaaggacacaagcgtgggaatcagatctgcaggtaccacacacctttcaggtgtgctgcagggatttgaatccgattttatgcttaggagctcagcatgtgtaaggtgtgatgcaaatggcagctgctgtgatgcacttattgacccgtatttttaaaaatcttcagaagcataatagctatataatatcgtgtcaggtgcacgtgtgccataattaatttcactgtttccttactactaggcatgaagtttagggcttttggcaatttttccattttaaaagtaaagctgtttgaataccttttgtgtgtaaaaacatatcctcatgtactttctgttttaggagtaaaattctaaaggtagaattataagggcaggggttgattgccacatcttacaaaattgctttctaggaatgtaccgatttatgtatatgtgcccttcgctagccctaaattgccatattttaaagttttctaatctgaaggtagaaagaacgtcttttttttttaactcagatcaattttttatgttttagtgttttcattccatcattcgaatttactgtacgtgtgtgtgtgtgtgtgtgtgtgtgtgtgtgtcttttgagacggagtctcactctgttgcccaagctggagtgcagtggtgtgatctcagctcactgctgcctcagcctcctgagtagctgggactacaggcatgcgccaccacacccgactaatttttgcatttttagtagaaacagggtttcaccatgttgaccaggctagtctcaaactcctgacctgaagtgatccacctgccttggcctcctacagtggtgggattgattccaggcgtgagccaacacacccaacattgtgtgtgtgtttttacatctgttttatgctttgcagttattagtgttttaatgataatactagcttttcgtctgtgaaattttcaatttttatgtactagaattttttaagctttttcctttcctttttatgtttaagctcttctccgtctagaaactttacatgttctattatgctttttattaaacaagacttttgctatttattgaatgttttataccagcttattgattcatgatgcatgtatcctcatcatagaagctgttcttaaactgattctagctcatcattttcctctagctcatcattttcccctgtgctagaactgtgcttttcgtgtagatttgtaatatacaactagttaggcatatttcactcattattcttttcaaaaaaattttagcttgtcttcctgctaaatcttcaccaccaaggttttaattggaagtctactagaattcaaattgggaaagagaaatcactttacagtgcttggtgttctccagaatggtggcatcccaccacaccttttgtgtgtgtatgtgtgtgtgtgtgaggggggctgtctttttatgtttcttagtacaatttgatgttttctgtttgtttattccattttttttaagttgtttattcctaattttagttcaggattatggatgttttctttttaatgtgtgtttattttctaaatagttcccagaatctagaaatgctgttgtttagtatgtttttgcaattcttccccttgaactaagctatctcacaacatcttaaaatgccctttgacataaaccgtcaaccattagtaaagtaagattgtgcttccatgagtaatgggtaaaattggtacgtggttttgctctgtggcatttgtgtctagtcagggttaagttatctttgcaaaacagattggatgaattttctttcttttctctgtggtcagaggctatttgttactacacagctgttccttaacctgcatagcctataaactgttttaagaggtaatttgttaatgattttattttttctctttccttgcttttttttctgtttctgctacatcaaagatcagtctcgagaatttatatttttccaaagaatagccatttttttaagatactttaatatatttgtatagtatgtacaaagcggtttttattcatttttgttaagttggtatgaaagcaggggagacattgtttcagtgatgaggccaagcagttactactgtctacatttagttaattacacttaatatgcagttggtgcaggttcatttttacccatatatttactggtctgatactctttattcctttgaatgtattcaggcttctgtctggtattattttccttctgcctgaagaacattttttaacattccttacagtgcaggcctgctggtacaaactctctcagcttttatctagaaatgtgtttgtttctcctctgtttttgaaggacatttatgctgcatttgtgctgtgtatataggttggcttttttttttctcttcatacacttcaaaggtgccattccattttcttctgtcttgtatactttctgaatgtaagtattgagttgatctgttattctatctgtaatctttttgttctcatgttatcagcagatgataataggccttagtttggggtttgtgtgtatttatcatagttagtattttttaagcttcttgaatctgtcagcttctggtttttatcaaatatggaaaactttccactattatttctgcaaatgttttacttacacacacacacacacacacacacacacacacatacatacacaccccttctctgagactcaaattacacatatgctagactgcttaatattgtcctacagggcactcaggttcatcgttttttctgtttcttctcctgtctattgctgtgccttcaggttctctgatctttttagtatctaattggttcaacatattcaatgaaatttttattcctagtctttcatttctgcattatgttcatgtttttctttaaatgcttgagcacattgagattataacagttttgaagatgttcttttctcgtaataccatcatctctcatttttagtctttattaactgattttatcttagtcactggtcctattttcccacttttttgcttatctagtaatggttggttgatgaacattgtgatttacattttggggtgctggattttgttgtatgcttttttaaagtgttagatttgttctggcaggaaattgttagttgtatatcagtttgatcctttcacagcttactttgaagctttgttagtgaaattttaagtattctttattctagagctagattagttccactgctgatatgtgcctgatctggggtctctctactgaatgcctcatgtatttgatgaaatctctgctctggctgattaggacttccggccctaggcagacttgagattattcagtttataggtctctggtaattgttctttcctcaaaagttgttcactgcccagccttgtggaatttctccctgtgcatgctcagattggttcagcaaagactcaaagggatcccctaggctctctggaactttttatctatgtagcttcctccttttccatatcatgtctcacaaattacagcctcctgggcctcccccaagtcatctgttctaagacagcatttttgccagctatgtctgggtttcccatccctgcacctgcactgtggcagctgctttcggtggaaaggcgggtggactgttaggctcaccatgtttgtctcctttcactctgggaacattgccctgcacagcctgtggtccagtgcctgcaaacagttgttatgtctattttattcagtttcctagctatcagtggcaggtgaagaagtacagacgctgttctctttaggtgggaagagggtgtcacaagtcattgttagagacttgcagtttttgaagcagtgatatttaacagatttgccatatgtatttgaggatatcctttttgctcttgaacatattaaaagaaaatcaattactgcaagagatactaaaataggtttctttcctagtcgaatgttatgttaataaatcctaggaaagccttggtactctgaatccaaatccgtaaggaactctcagttcacagaggcaacttgtactcccgtgtcaacgatgagagtcatcgttccaggggagtcgcactaatttccacagtttggggtgaggggggcggtttttttctgaatctcagtgtttaccatttgtttagtcattagcagctacttctgctctgaagtgtggagcttaccatccctggcttgggttgaggtaatgagctgtgtgacacttggccagtcacttagctacttgtctctaaattgagggatctggactaaagagacttgaagaccctttccatgagtttactgagtaaacatgtactgagtgttgtatgcactggggatgggtggataagacaggcgaggaccctgctcttacacagcttggtggagtacatcgatgatactgtaaataaaaatacaatgagaaagaaataactttcatgggtgctttgaaggaaataaaccagggtgatatgaagtgctgatggcagggaccagcattaggatgggaggcccaagaaggcttgtctgagatgctgaaatttgagctgccgtccagatgagcagaagaaactggccatttgaattccaggtcataggcgttctaggcagagggaagaacacatgcaaaggtcctgagatgggcacaaccctgggtgacatgagaaccccgggtgatgtgagaacactgtggcatgattgtcttgagtagggggcatatgtgatgatcagggtcctagtcagtgctggcagcctgtgactccaagactcgatcctgctgtgaatacttctctacctaaatagtgcaaagttcagtgtcacatgccctactcagatgagtaacagggagtgccaggaattacattggggtggggtgtggtcgctgaagctccaacaagatcacagagtctgaaatgagcagggacctcactggcacgaggagccaacacagttttaactcaggagtctgaaggccaagttcagtagtcttggtcagcgtgagccaaaatgaatccatttttaaattagcagaaccacggatagttcgtagggactatcgcctcaaagaaaatgctgaagctgtttctgagactcacgtataaaggctgcatgggctccatggcctagaaatgttgcttcggtggaaggaagccaccaggaaaactgctgggagagtttaaggaatgtgtgacctttacgtagagaaaggaaagacccagtgaaagcaagagcattccagaggtggggagagtggacctgaagccagccagctttgccctggtgggaggcaggtttcttagccatttgggctgccttaacaaaataccatcaactgggtggcttgtaaatacacaacagaattattgtgttaattatcctcataattctggagagaaccctaagatcagggtgccagcaggttcagggtctgctgagggctcacttcctggttcacaaatagcacctttctgcagcatcatcacagggcagaagagccagggggtgtcggccctcatttataagggcactcatcccattcatgagggccccacccccatgacctaatcaccccccaaaggccccacctcctcagaccatcaccttgtgggtgaggatttccccacgggaatttgggtgagacacaggcatttgggccatggcaccaggccttccctgtgttgccaggatgctgctttttgtgcttggatatagcagcaattgaaaaatccagctcaggttgaggaactcttaaagacccaggagctctcacttggcattaccagctgctggcatgtgtagtctgaaggaacccccttcttagaatgcccagagtctccacgtctgtctcctgtcccaacatgccagcaccgtgtcacgtagcctctgcctgcatctgcacagcattgtttctggtgtggtctctttttaggcagggaaatcattgctgtcggctgtcacctaagtggcaatgtcatctcacctgcacttttaacaactgctgtgcccacgtgtgtttttattgatcgatttttagttgtctttcattgtgtcctgtggtctggcttccactcttcacgccatagtgaagcattgcccatgcttacgagtggcctctcatttctccctgcgtcgcctcttctgcattctcctccacctctgtaacacctgcccctgcagacacatcctcactgctgtggcctgctctccttcctttgaggaaaccagttattattgccttcctgcttctctgctgcctcctggctctgcctgcgcccctccccagcacttcccagctggcttcagcaggctcactctctgtctcagtcttcccctgggagctcatactgtcagttcagccatttctggcaccaaccccaagtacctctctccaaccctgacttccctcccctgatctagatgtgcactttgggctatgcacatctccacctggatgctcaccctggaggagcaagcatctctccctcgcctcctccctcagcaactccaggctgccctgtggaagcccctcttccgctcccccaggctcacatgtttagagtcatccagcatccatttctctagactcagaaggttcctggccatgtggactctgggtcccagttgaatgggttgaagaatgatggacagagggagaggtgaagacagcaagtgcaggcaggtgaggccgtgatgggactgagactggaggaacagattagagagggttcctgaggggagacgagattgtcaaacgtttttaaacaaagatgggagaaggatctggtagggtagaggatggaggttaaaagaaaaagtctttcctgagtccctcagaaggactcagcaacacctttgctgactggtaacatccgacccagtggtctccagttagaactactccaggctacaagtcctttggaagcttgtagagatttgacagcactgggatgacagaggtcaggattatgtgtcactgtgttgttggtcatatcgacaagtcactgaatagtagtgcgtattgcagtgtgaactggaaaatgaattacagtgcatccctaccttgggcctcgcctgccacgcagccttaggaaagaacaggaagctatgttctgatagaggagccattctaagatattgtggaaggaataaccatgagatgtaacaatgtgtatatcttatatatgtacaagcaagacaacaatgtataagatacagcatcttatactacatctagtgtactgccatctgtgcttttaaaagccagggtggtggagaagtctgtattgatgttttcttgtatatccatggagatactctggaggggcccctgagaacccagcccaagtggctaagagggcagggggatcctgtgtaaacaggatcaggctgtggggggctttcaccttaatatcttttatattcttaggtttttgaaccatatgtatgtattataacctctttaaatttttcaaaaatataattaaaaaaaaacctctagcaattaaaatattatttccaccagttgaatgaaagtcaggttgttttgccagggaggttatttggctcctctgaaatgtccattcatgagttttctggtggctttggcttattctctttcactttggaggaaatatttctgattcataattcttcatgctccgccctcagagaacttctgccattgctaatgctactagtaaagtctgatctagttttcttacatttcattccttttttccccatccactctacattcatcaccacattggatcatatttggacaattcatacagacaggaggataattatttgcattcttaaccaggcacagtggttcatgcctgtacatctcagctgcttgagaggccaaggtaggaggatcacttgaggccaggagtttgagaccagcctgagcaacatagcaagaccccatctcaagaccctggcaaaacacagttgctgctgttgagctgtgacatacgagggaacgttggcaggatgctttatgtggtgggggagaggagagctatcttcagctgcttaacagggctgtttgaaaaaggagtggaactggaacaagtagatggactttctgatagtccctcccagggcagctagaaacaactcctgagtgtcccacaggggtggtggtctgaagtggtggctgccacacagctctatgacccgcagagaaggctggctgcatccacgtgtctatccagtttatcttgcatttggaaaaagaagtttcgactagatggccttgactctaataataagatgttttcttgattattttccttttttctttcggcttctcaaacctggaatagatactctccatgagacccattctgtcttgattctgtcctttaaaaaaatctctaactatgtagcttcctttcaataagtacctctccatctgtattttttaggcaaggtgaaacaaaagagtgactttcttgtcagagcttgaaagagagcaagtggctttaaaagtagactttggctttctaaaggttctaagttttaatattcttatattcgtttaatcctaagtgtgtaatgaacatctttatccaattcaaagatgacacctgggagtgaactggtggtgggacatcacagactactgtgatttcaaactctcggcaggtacatctccgttcatggatgcattaacagccaatgggacaaccaacatacagacatctgttacaggagtgactgccagcaaaaggaaatttattgacgacagaagagaccagccttttgacaagcgattgcgtttcagcgtgaggcaaacagaaagtgcctacagatacagagatattgtggtcaggaagcaggatggcttcacccacatcttgttatccacaaagtcctcagagaataactcactaaatccagaggtgagaggcgctcttgggctggcgtgggcttcgcgcttctccctgcctgatttccaggcctgcctggctgaactggctcttcctgtgctctttctaaacctccttttgggccatctcccgatgcccaccagaagggagggagcagaggggaagttgcgggctttgctccatgtcccacctccaatggccgtgaattcaggatgcttggcctgtgctgagtgtccatccccattctcccgggtgtgggtccacccaggcctctgtgcctctgtggttcacctcctgcctggaagctcttcatctggcgggcacggggctccatgaaggcacgtgggaaatgtgtgtgcacgcgctttgctttagctttcatcagatccttaaagggttctttgttcagacagaatttaagtgcccccggggatcccagtcccttcagaatatttatcatctttccagtccccagatactcctcagcggttgtagcagaacacacagcaacagggatttccacacatgctcattgctgatagtgcctagtaagtaagttttccagaactggttgttggaaaggttagaacatgaattttgtgaagtttctagaatcgggagtatttgaacctaacctatatctttccaaaattttaagtcctagtagtttgtgagtagctaggttgagttttgtccagacaagaaaacttaactacagaaagtctgtgtgttcgcccggggtcacataacaaaccagttcaaagttggtccttggtacatttttagactgcagagtcccttcattgattatttttaaatgcttcacagagatcatttaaaatgattttatgccctaaaattaccagtccatgctaatgtgcttggacttaacgcacttacgcaccaaactattttctgtcccaagtgtaatagggtagtttttaaaacaaaacaaaacaaaaaacagtagaactgaatgagtttctttcaactggtttgaatgtgccacctgctgtccaaactggagaaatgcccagtgatataataagcaacttgccttatctaagagccgcaatttgccttatctaagagccgcaatggctgtataaatactaagataacgtagattcccatgtctttttaattatactcgagttatgtagttatattttactccatccccagcatctcaatctctggttacagaaaatgagacatttgcaaattaattaaaatcatggtagatatcagtaactgtatcaggctatgatgcatttttcacagatgcagattctccagtaataaaatgcttttaggcagggtgcggtggctaatgcatgtaatcccagcactttgggaggccaaggcaggaggatcacttgagcccaggagttcaagaccatcctagacaacatagcaaaactccatctctacaaaaaaagttgaaaaatgagccaggcatgatggcacaagcctatagtcccagctacttgggaggctgaggcgggaggattgtttgagcccaggagttcaagaccaccctagacaacatagcaaaactccatctcttacaaaaaggttgaaaaatgagccaggcatgatagcacaagcctgtagtcccagctacttaggaggcggaggcgggaggattgtttgagcccaggagttagagagcacagtgagccttgattaaaccactgcacgccaacctgagcaacagagtgagactctctccaaaaaaaaaaatgctttaagattttaaacccaaaatattctttgccactttaacttctggtgactttcaggtaatgagagaagtccagagtgctctgagcacggccgctgccgatgacagcaagctggtactgctcagcgccgttggcagcgtcttctgttgtggacttgactttatttattttatacgacgtctgacagatgacaggaaaagagaaagcactaaaatggcagaagctatcaggtatgtaaaaatgatgttttttaaacattggttgggtgttttgtttttggtaaaccaatcctgatagaatgggcctgaccaagccttgagaataagatacacatcttctcccatggagagacacgagcagcaaaattaattaaatcatctgtctcttctatgggcctgccataaattactacttgccttgggcaaaatcttttctatgggcctgccatgaattactacttgccttgggcagataactgatttcaaggttggtttaaaccctgcaagtgttcggagaatgttctgatgattagagtagatgatcatgggtagccagagttcctattatttgtgccgtgagtatgttctgtcctcaacccctagataaagatctcttccaaatagtaagttaccatttgctcgactctgaagtaaattgtctaggctttatgatgagatagctccgtaacaccacatggagagttttgttttttggttttttttgttgttttttttttttgtttctttaaatacaagtagtgcacattcttgttcagtttcatcctaagttccaactggacagagaaccagatagtaggaaataaaaagcagaagtcctccttgtccctcactcccctcaaggtatccaacattcattggtgtgtcttccccaacctttttctgaacattttgttataattttcagtttaattttttagacttacttttaaactcagaagtaaaaattgtatatacttatagtgtacaacatggtgtattgaaacacgaatacattgtggaatggttaaatcaagctaattagcatatgcattacctcacatacttactattttgtgtgtgtggtgagaacacttaaaatctactctcagcaattttcaagtataaaaatacattaactgtggtcaccatgatgtacaatagatgtcttgatctaagcattttcaaatttttatttcatatatacacacaaatagtatcaatttagttctgttgttgctttgcaacttgcttttttcatgtgacaatatgactttgagatatttctatttccttggttgttggattttcctctgctatatgataacatatatcagcaaaactttctctaaaaccacttaattcgtctaaaatcatatcccctcatttatcatgctaatcactccatgtataattagaagtgtctgatttttcggagatgaattttatttaaaatggatgaaacctagtcatcaacatgaaagttggctatgcttctctactcacctccctaaaatgacatatccccaggtggcccccataaaccctttgtgcttgcctttttaacttacagaggatgaaaaatgaaagaaaacgtagactggcaaaatggcagtaaagtaagttggatcttttccaaaatcccagatttctggagggctgaagttgaactacttttgatagttactaggctccagctgagcactgcccttggtgcactgggctttctagcacctaaacccttctagagcttgcacagcaggattggtgtggtgggtaggggggctcttttttctgttttgttgagtctggggtaggcagggacgtctttctttgactgacacccaagatggctctgatgggcaccaaacagcccatcacaggagtcctggaacccacacctctgggttgaaggggattgccttagcctctcatgacatatttaatcattttcagaattactatattttctcatatgatgtacacatgtatttaggaggttatcccttaatcttttgaatgttaccttttacaggctatcacattatgtgtggtttttttcagaagtggtttgaaattttatagtctgatcttattaagtattgtttctaatctcctaggggatttcatccctgtggtacactaggtgggaccatcttgttcttcagtttaagattaaactgcttgatcagtgtcataaatccttggctgactctcagcgcctctaagacagcttcattattatccattcagggtgaattccatgaacttaacttttatttttaaaatacaaaccaccatgcctcctatggtcactttgcatgttctccataatatcacgctgaatgtacacataatattgtgctttttggtagctctgcggtcataagaaaatcggatgtgtcagccagtgccttctgggtcctggctccgttttcccgtgtaggcttttccctggctccacttgtgagcccgctggtgcctcgccgggtgcagctcactcctccctccagcgttgaattcccttggacagaggctgtgggcttgtggcgctgggatcagtaaaagcagaggaaagctagatccagccaggtttaagtggagatctcctttgttgaacttgatgtcactttaaaagttcactttcatcagctccctgctccgtccactctccctactccacacaaaaagctggattgatattcttgtgaagagccaagtcctgctttaggaaaaccaacttgtttcttctttatgtgactatatttttgtcaatgtgaattttccttaatgtagtctggcaagatcagaaaaataattagttacaccagagtcacttaacctttccttttcttatttgcatttaaattaatttttatgtggataaaagctcttcctgtgtatatttttcatttctctggtgtcttgtctcatgttccttaaaacttggaggcaaaggacttcatcgtagcaagtttccaaaggaaaagcgggaagcaaacaggaagatgaggtttcatattaggtcaccaggtatctagagcagctgactttgtgacgaggattcgtggtttgcagtttgcagggtaattgcaacaaaaatattctgcacctttgtggttagaacaaaattctttcaagttcatggacagcattaggcttttgaagtctgccagaaccagtagctgccactgggttttaaggaccaggagacttctctccccaaaagtgaggtttcttcttcctcccacagagggagaccgggggccctgcccaagcagtgccccaggggcaagaggatttgggagagaacaaagtgagccagtaaacatgccccatgaccctgacctgtaccccattagtccttcaaacgaaggtgccattcaaatgagagagacctcagccatggaaagcagcacactggctgcccaacttcaggtccctgctgcctccttctccccaaacgttcctttgacagtccctacatcttatgtgattttccagctgtttgatatttccagattagtaaatgtcctttaaaggaagagttttgtttaattataaagtctttttagactaattatgtggcaaatatcagcctccttccctgccatacccaacaacagccttgaattcaattccaaagaaacaaatttaacttcagtacattgcatggcaaacatttgagtgttcatacattttgatttcaagtttaaaacacacttggctgaagcccacagaagcaggggctacttgggagaggaccgtcccaggcttgaaggcagcccctgcctcgcctctggttccttgtgccttgatttgcagctcccttggttaagcctttatggtcctgggaagtttctactaggcagagaaagcatttctgtaaaggttttcttttttaaaacaaaacgagtctctgtgtgcaccacatccatttctggcatctcagggctcactattcagaatggccagttcccattccctgaaaagggaaggggctctttgctccagagcatgctggttcattcataccccgtccagaaagagccaccagcttcaggtgaagtcaccattccaggcaaaagtaaaaataaaatttcagttccaaaaaatgccttcagcctatcaaaatctaagtttcgacttaccaatatctattaatattttagaagcagatttttttatacaaatatatgggcatggaggcaaggatatatgaaataattccttttactgtttttctgtagaattaccttcttattaccttgactttgatcatcgcttttatgttaatttattgccccatccgtggtttccagatgtcagcctgggcaacggctataacagtttgccttctgttccataaggcagatgaaattggagctactcagattttggaaacagctgttccttatcattgagagacagttcagcagttttaccttttcatgagtcatcagttactgggcctaggaaatgtatttccatcttgtgtcattgaccccatatcttcaaaagatgacacaactgaaatagcttcatgtagttcttctaggcttatttcaagagtctgcttaaaaggttgtctgacactctgatcattaaaccccagtgtgatctttctaagaatgcctcaggctctctcatttagaaagacttagtgcaactcattcatttgaatgagttaattcttgctcaatgcaaagatcccacaaaccttgggggctaggctgaggtccagccgctaaactctgcaattcctcactctcctgttcatacacacacagacacaaccctcctcacctccctgacctgcccctgccaaaaaatatgagtcatccgtcagtgtctcggggagttgagtggggagctatctcagatgctgagtcatgattttcagagaagatctgaacagattgctgtggttttaaattgctgaattgtagagagcatctagattgttattttcagtattaaagatgggggtcaggtttagaatccagcaagtgaaaagctgtccttactctgcacttctgatctagaactcagcctgcactgaagggactatcttgtgtttcttcttttctccactgtgtgaaatcataacaagaaacaacctctgagcataagatcagcttctagtatttaggggaagaaaatgcacattcctaaagtggtatgacaccaagctaccctacattgaaaagcagcctacttttccagcctgatctaaagcaaatcccaaaatagcatgggcttgatttattaaacctctgtcctgtgcagaggctgccccacgcctgaccccactgtcctccgaactcctgctgcagccgtaccctccagccctcagtggagcaggatgtgggtacaggcctgagccctgtgctgtttgctcttcttgtttgcaggtcgcatgtcttgagccagcctgtgacactcttgtctctgtatcccccagactgttcagtccacttccacataaactcaggaaatagcaattattgccagataatcagtgagctgtctgaaatcatgaaccaaggccagacccagatcccagggtttttgtgaaccctaatccaccaccgtacacttaacaccaggcagtcttagtatgccctgggccagatttcctctgtgacagcttcttgatttgtcttgtgaagcccagaatatgtactgggctcctgtgtcttcgagggaagacaggttggggagcaagatgtgttgtttatagagcccgagagccacctgcaaattccagtgcagctcatggctgcatgttaccctgtggccttcacgtagggcctgtagtgacagccactacatgcgtgggctccaggctgtcaccaaacctttacaacacgtagtaaataagtctagggtccacaactgctggggaaggccttaaacaaatctcaagtcttcaggatttccgtagcatttacatcttggtaaattgaattccataatagacttttcctttgctcaaatatgcaatgttttgagtaattccccatttatttttcattttagaaacttcgtgaatactttcattcaatttaagaagcccattattgtagcagtcaatggcccagccattggtctaggagcatctatattgcctctttgcgatgtggtttgggctaatgaaaaggcttggtttcaaacaccctataccaccttcggacagagtccagatggctgttctaccgttatgtttcccaagataatgggaggagcatctgtgagtacctttttaaaaaaaaaaaaaaaaagtcattctagaaagcttcctgaagaaatctagtttggttattgtttttctaaagctgtacagtgtgtcattctgtggggactttccatcttgtaattcagatttgggttcatagacgttgttgacctttgttgcatcattccctagagaaggacttcattcactgaggagcctaccactttgcataattcacatggatatctactgttagtaaatacccaatcagtaacccaaccaacaatttgcaattgaaaagttcttcacctaataacttaaaaactgcacttttaagagaaggcaattttaagagggagcaaagttacataggattagagggttgtcgtccatataattgtgtgtttttatttctttaactgtttaatccgttcattatagtagtttgtgtttgtattgtagcttgtgatttatcaagcagttattcacatctcattctctagtccttgaaatagggcaggaggtggtgtcacaggtcaggttctccagaagcagacactgagatgagtttggcacgtggagaattagcaggtagtcagtacctgtggaagggatgggaaggaagcaggaccgcacagaggaagaggtcaaagtgatactatgcccatcatccttaggggtgggatgtgcgggaagcgttgcaccctggacgaggtggctccctacagctgagggcatccctaaaggcgccctgtggccgtctgctaacagcagcacccgcagccaggcagccaggcctccccaggagcgatcatggcagcacagttccatgtccaccacagttcaccccagggccattcagatcattgatgcaccttttgggggccagctccttcaggttccaaggggctttctttctgggagaaacttagaggaagaagattaggcagcaataacttgcaggccagaacctgaaatgtttaacctggatgttataatcagtgggtaaaagtgtgatgagaaaaaggatatttggatcctctcattatttgcagtgggaaaaatagtaactttacagtaaagaaacctggcagctaccaccttgccgagtggtcagagttcacagaaataagacaaaagccaacatgaagcactgaggggaacacagccttcgtcgctgcgtgggatttctcctgaaggtgcagcagctcagtctcatcatgaggaacgtcaggcccagactggggggcagtctgcagacacccgcagtgctccaccaaagcgccaaggtcggagaagacgtggaaagactgaggaaccgtctcagactggaggagaccaaggggacacgacagctcagaacatcagggacccaggatgggctcctgggccagagaaaggacaagagtgggaaggctggtgaaattcacatcatgtttgtagttgagtgactagcacattgtcagtggctttggtcatcttaagatgttatgtgacattttttaacctagggagagctgcctgaaggtttatgggaactctgtactacttttatcatcttcctgcatctaaacgtacttgaaaaccagaacgtttaaaataaaggaatacaagagaggaggaggaaggtgactaggccagactgtgtcccccagtgccgcactggtctcagagctgccctgctcctcaccttctcacaccccagggtagttcccctcacccatagctcccacctctgctggcttcagcagccgcccaaatgctaaaacactcacccccaagggatctgtggcctgctcactgtgcccagctcagagttgctgcacttgtccacttaactgctatagttgatcaggagaggaacaagcagcaccggcctgcatcccatttcccaggccacgtgtccttccagatagaggtctttgtactgtatgtgctacaaatcagaaaacgctgctgcccaccatcatggagccacctccaaactggcacctctcaggccgtgccgacgccctaccaggctggcggctgtggcaggtgctatatgtgacttagccacaggactctcgggtcctgtcccctgacatggtctttgctgtgaggctggtgttctggtcacaacgcaccaccctgaggcaccccatgctggtggactagaccttccatagccacagagagtgatgctgcctgaggatctgcaggtgggacaggcagactcagacccagaggatatgcccatgcctgttggagccgtcagcgtgctgcccagcgcccacaggcgggcctccctgggaatggtgtcttgtgggccgatcacattggcatctcctgctggcaggctggacactcagtagcaacagcgactgcatcagcctttggtaagtcagagactgtgctgttgaggcccctctggccagccctgggtggccagcgaccaccagccatctctcaaagctgttcagtgccccctccatggcggatgctctcaggtggacattaatgtgagacagcaacctgcacgcttcccattcctccacccaccacacgcctctgtccaggacacccacccctgctggcagctagtgttattctaaccttgatccacttttttttctacaccagggggtgaccaggtgcatctgcccccagtgggggcattttcctcaccacattctctttgaggcctgctggatgaggctctggtgaagttgctgtcccctttttggcttgcccatccacccagtgagccaacccacccacaggccacactcggtcacagggagtccccccatggctgtaggtatgagctgaggcagggcgcaggtactcaagggtctgggggtgacgcaggggtctaggctgccggcccatgccctctggagcttgccaagcccagctgtgcatctgccgcgggccctgcctgaccttgcgcctgtggggctgatggaactcagctcgtggtggtcactccccacatgtggtcatgtggggtcccgtggtcgggcgctttgcctctcccagtcccagccagcactccaggcatgcccttccctgctgtggatggccccaccggctgtgctgccctcctccctctggcactgaccacaggctccatatgcatcttgtcccacccctccctactcagccctggcctttcagcctcactcagcagggcccccacctccctcgtgcttccagtagccatcccagcagccaggtcagaccatctcctgggaacctagcagggccaaatcagtatcgcaggagagcccccacgtcagtgaatctcctgtccagcttgtggttgggccccaggtcaggcgccctgagaatccaggccctcgtgttttctcacagctcccacctgcacccttggctgggtcgtgcagcccgtttcagggaagaggcgagttacaggcctgacgccaggagaggggatggggcaggttttggggggcagtgttgccttgctgagagatatttgccttatcttctagcaaggggggcttacgtgttctgatagggatgggtgggccatgtccgtaggctcgggatcagaggaagctggacttcaaagttgggggcattcacccagaagcgcctataccaagttctagggtacctccccacccctcacaagctgacagaccctcctccagtggctgattaacctgggtggagcttgtccactcttgctgacaagtccaggggctaaggccaagtctcagccctctctgcctcttgctcccggctgcccctctgcttgcacccatgtccctgcccctcacctgtgagagtgttagcacgtggacggctgcctgtgccaggtactgtggcttctccacctggcctgttggggggtggtccctcattgccagctggggagccgtgcagtttctaaacctctctcttcaccctcggtctgtccactcccctcgtcacaaggtggtttctctggaagctaagatagatttgggaagcagggtctggtagattaggtgccagcgtccatggaagggcagaaaggaagcaggattgggcagagctgactgacagggagctctggaaccacgtggcctcacggcggttcccggtgccccactgcagttggccgtggggttggcggccctgggaagagcggtccatgggggaggccctgagctctctgttgcctgctgacagcacttcccacagcaggcagtttgctggggtggggacgtgggtggcttatccaagtcatttgctttgtcctttacaccgtactgcacgcacctgacaccaccagactcccatggtagagtcattatcagtaaaatcagttcatcgtagtgattactgtaaacgagactgtgtcctgccagttaaccctgtcccggcaggaaagaatcctcatcctctggaacatcccgtgaatctcattttgagttatttatccaaaggaggttgagatctgaggttctgacccctcccactgtatgatctatgtagatgtgtggtgtcggtgcagatgtggggcaaatactaaaccaccttgatgttcagacacattttggccaaagacattttggaagtggagccctggagctgaatgctgctcaggggtagaggtgtcagagttcaccattcccagaaagggccatgaggcttgaagtcatcacaggacgaatgcctgccctctggtcagccgtgtttctccctactctacaagccttggcagatctttactttacgcttcccctggagatgtactggtgcctcttgagctgctgctttcaactgggcagttttcacccccgacctcacccctggggaacaatgtctggagacaacttggttgtcacacatgaggagatggccgttagcagaggctggggtactgctcggcaccctccatagcccacgggacagccctgcttagcaccctgcatgtagcccccacaggacagcccccacaccaaacaacagtccagcccagaatgtccctagtgtccagggggagaaaccctgctctaactcaagagcgaagagcctgcatttcactcggcgtgaattctacactttctgagcagagtatctgacgaagcctctctacagaaagtgaataaacgttgttcagatgacttcgacaactcttgttgaaagtgactatgcagatgatgtaaatgatgtcgttcctttcatgagcctttggtgtacttgagctttcagcagcctgaggcaagactggacaagtgtggttttccccactttgcatgtgcagagctctgccaggaggataagctaaaggaatcacattatcaagataaaaagaatatgcaaatagtgcaggctgtgtggcctctcctttcttacagcaggccctccgctgtaggcgagggctacgtaaatcagccaaggagtctcttccagtttagccttcctggtgcccagtagacattcatggagtgcatggaggatggcacggtctgacgcccacaggctcccacgtggaaatcttgcacctctcaggggcctgctggggtgtgaagctggagaatgcccagcgagtacctgagggccttaccccacgctcacaccttgagagccctctcttggggacttcagagactggcctgagggagcaggtggtaaaacctctgccacagcagtccccataaggctgaagattcctggatcccctctgctcatactgggccagtttcctcgccacccgtcctgctgtactctggccaaactaaaaagacatctctatttaactttcctcggcatttcccatctctctggatggttccaggataactttcttttaatagttggacaactttgaccacatcatggggtgatgtaggttgtctacagggagtccctgtgcactcagccatctcagagcaacgtgctagctggtcaggttcccaccgcctgcatctgtgtgaatcggttatttgggtagaagtttgaaacctctcattttgaaactactgaaaatagtgtgtttatataagaatatgctcacgcaaattgcgtgtatttaatcctataatacatatcttaccaagggagatttgttgttgttgttttcttgggtgactgtcgttcaaaccaactcactggccgtgtttaagtgaaaaagctttaacaacctagcgtgagccctgtcatttttgctcttgagtaaattgagaaatgcccttgcttgtcctgcacatccaaccacctggaatggagaacaccgaaggtagggaaaggatctccagggatgagcaggcctggagccggcggggctgtggaggaagaccggccgcaatgagtgagtgctgagcagagagaagggccgttctcggctggtatcaggcccaagagagtcaacaaaggggggacgaaagggagacagggaagagaacagtggtggggctgtaagttgacctccaggtggcagaaaataaagttggaagaattgactgggacagacagccagggccctgcaggaagggcgggagaggaagcctgcggacacctgccctttgtgattgaaccgcagacaccaggcctggcggggtcgcttgcctccgctgcccaagctaaggctccactaagctggtcctgagaacatacttcatgctcaacttcagggatgtggctgtagtgtcctcactctatgctgagaatgaaagaagcacagtctatgaaaggaaaaccccgacagcacagagcacttcgtgcggcagcagcacaccgggagtcccactccctttcctgctgcgtttggatctgccgtgacaaggactatcagaaccactcacagtaaggtcgggtcgcgtttctaaatccactgtttatggaccgtcttttcactgagaagaagctcgtcagttcaggggtttctagaacttctccagactcttcaaaaactcatgactttctccaagttggtaatcccagcactttgggaggcccaggcgggcggatcacgaggtcaggagatcgagaccatcctggctaacacagtgaaaccccgtctctaccaaaaaatacaaaaaaaaattagccgggcgtggtggcgggcgcctgtagtcccagctactcacgaggctgaggcaggagaatggtgtgagcctgggaggcggagcttgcagtgagccgatattgcaccactgcactccagcctgggcgacagaaggagactccgtctcaaaaaaaaaaaaaaaaacttgcaaaccctcatgaggagcctgtccccagccctgttttccagcctctgcctgcatgggaggggcagtgagtcagccacgtgtttgctttgccgcctctgcctgtgtgctctccaagctgcgggtttcacatgcagtaaacggcatcaagacattgacagaaggtgtatgggcagtcttacactgtctcagcgacttcagggccaaaactgtcttttgtgattttgcctcttttggaagtggaagccacctaccgaaattgtgttttaccagagccccaggagctcatagtcaaggctttgtgacatcagagttgttaggaaggttaaccgggcaagataaacgacagaccaaaaattgtcccctcaggccagtgtggagtttctttatcagacatgtgtgcaccccttcccgccttatctcggcatctgtgagcctgtcatttgaatgatgtaaaatccatacatgttgtactgagaccttaaaagtgatctagttcagtgtcatgtattaaaaaataaagtgatctagaatccaggacaaggttaaaattaatttcatatatacacatatatattcttttaaagaaaacctaatgttagctttctccactgagccgtgtgaggtgactgtagccagcccctcaagcagattacggtcatttttcgccacattcaagccctggatagttctgtcttttcgtatccaagcgatacaaggcagcctccaaggtacgctctagcagaaacggtcgctgccattagaatattttttctgtatattaaaaacaagtcaccattggcctcccagataaagaaaaggtttggtaggaattctgtgcctggttcaaatccttaaaattataaattgcctaactttgcatatgctgattttcccaggattgttttgtgtattaaaagagctcacacgtgggaagggccggcattagggggaggaaggcagatgagaggagaggaagctataccagtaactttttaaacgaatggcaaaaagaccttttctattttagatttctttattgagtccctgtaattctgtagtaggttgtaaaataagacactttttgctttcctttttaagaaaaaaatcatcagcccgatagattactttcccacctgcccaatggactgcaccttgcacagggtctgttcccagcggcccctagaggatgtgccccatttccctgcggggctggtatttgtgaatgtttcccttcggtgtggattttaagggatgggtcttccccgcccgcctcccaccgcaattcatattacatccactcttcttccttgcaggcaaacgagatgctgctcagtggacggaagctgacagcgcaggaggcgtgtggcaagggcctggtctcccaggtgttttggcccgggacgttcactcaggaagtgatggttcgcattaaggagcttgcctcgtgcaatccagttgtatgtctaattgcttctgttacacgttactttttaaaaaatagaaacttttccctcagagagctcacaaatttgcaattattcctaagtcctttacgtttgtcctcaacagagcaccttcccgtgaagtcctgccagaacctattgccgccactgcccccacgcacgccttgccttccctttgcaaatacccaggaaccacagaaatggacttcagtctgaaatgtcagcaagttagcaaatgtcctatgaaagtcaacaacaactaacatggatataattctttactggttccaaagcctttcagtcacattattagcttctcccctgtttccccacagtgggcctaagttgtttttgggttgttgttgtttgtgagatggagtctcactctgtcgctcaggcttgagtgcagtggtggaatcttggctcactgcaacctcaacctcccgggttcaagtgatgcttgtgcttcagcctcccgagtagctgggactacaggcatgcgccaccatgcctgggttatttttgtattttcagtagacacggagtctcaccacgttggccaggctggtctcgaactcctgacctcaagttgatccacccacctcagcctcccaaagtgctggaattacaggcatgagccactgtgcccggcctcctaagtttttgtttaataaatgtgctaaataggccgggcacagtggctcacgcctataatcccagcactttgggaggccgaggagggcagatcacttgaggtcaggagttggagaccagcctggccaacatggcaaaaccccgtctgtactaaaaatccaaaagttagccaggcttggtggtgcacgcctgtaatcccaactactcgagaggctgaggtgagagaatcgcttgaacccgggaggcggagattgcagtgagcggagatcccgccactgctgtccagcctgggcaacaaagcaagaccctgtgtcaaaaaaaaaaccacaaataatttttttttaaaatatgcttgtaacaaaattgcatttggcaaattataggatgtgaaatgtataatattaactgacacgactcccatcccaggcagacaagcaaccctcattatgaaaattacattttgtttagaaaaattccctcaacaggcatccccagagctttctgggcatcagcagagcagacgtccagttcgggggtccacgccagtatgcggcagtggcgcggggccgaggctgctcacaggctgggtgccgacagcccagctctcctttgaaataagccgttttgaagttaagaatgcacccagtgccaagtgtgaaatgtgctttatacatatgttaggcccgacatattgtgagaaaatgtctggtaacctttttaacaggtgattgctggaatttgatgattgcctccgtaaatgtggaggcacaggggacccgtgtctgcccgcatgcaccctgctaactggctgcttgttttccggtgcaggtgcttgaggaatccaaagccctcgtgcgctgcaacatgaagatggagctggagcaggccaacgagagggagtgtgaggtgctgaagaaaatctggggctcggcccaggggatggactccatgttaaagtacttgcagaggaagatcgatgagttctgagtgtcgggctgcccactggtgacaccgggatcgggctgagcaggagaacatcaccggctccagttcccctgatccattctcacagcctgaaacaagctcacccgtagcttacgcttggaagcaggactgggaacatccacgctatttattatcgaggagttttaaagtactgtaactttaaaataaataactacaaagcttctttgtccaaacgtcattattttatacttatatacacgcaggtgtaaaagtataaaggtgagcactagactgctcttagaagctctaatttttgttttctttggctagtactgtataaaaaacagaattgtgttttattggttttggatgacagaaaagtctggaataatgtttgttttcctcatttcttccttctagaacacagaatctaaaggggtattagccagcctcgcctccctgccccacgtagagacacagagtgatgtgaggcgttggctttttctccaagaaggtacagatacctcagattcgggaaactcaaaatcaaaagacttagcttctaggataaatacttctgatgaaaaatccgctgaggagcataccccaaaccagacatatgcttaggattcatgctgagatatcaattggtttccccttctttttaaaatacgtccagttcttacccagttaacatgaagaaaccactgtctctagaagaaagcttgttttgcagtattagtgaatcactgaatagcttaagtatgactatctaagttataagttagtctttagtgggttttaaatagtttttctgacccttctgaaaaataactacataagtgcttcttgttgctgggtgagaaatactactttatagacagttttggttttctgtttgcagatatgattgatgtatttcaccaaaataaaatatttttatgtttataaagtgtaatttttaggttcacttagaatatattttatttaataagttaaaattcttttggcacactattaaatgcaaaaactcctttcaaaacaaaaaagaactaccttatattcaacatttaatgttcttggcctctgcttttatgtctatacaatatactgagttcagtatggtgtccaagagtgccctgtgtggatagacatgtgcactccttccaggagtgggtactgattccagactccagatgcctattattagttaggcttctgagcttgcaatcatattgaatgtatgaagagcgaaatcaaattcttatttttgtacagttttgaagtttatacttagaactgaccacctccccggccacgcggagagctgtacagtgtgtaaatctgcctttatcttggattgattggtacagtatttttgcatctgtgggacctaccttttcgttcagtagtttgaactatatataaactgtacaatctgtaaagtttttatagaataaatattcagctgtgaaaactggttaaataaaactaatatttcttaacacatttgaaatgtttctctgattcttgtgagatttctcatgggatgttttctctttcgtgtgtgtgtgagatatacatgtgtgtataaagcatctgtacagttcaatggaatgaaaccctgtgtgactaacacctaggtaggacctaacaatttgaccagtatcctccctggtcaccttcacccgggtgaccatttcctcactttgtgtccatcatccacttctccttcaaagaacttattcctaaaataaattacttttagttctacatgtttttaacctttatatcatatcacaaataagcttctgtgactgactgacttcattcactgttaagttttctcttacgtagagttgtaacttactccttctttacccaaacctgtcgtggctgttttcactcctgttttacagatgaggaacctgaagaattaaacacttgcccaacgtcatgtaggtaatttgaacaggagtagcatgaagcttttacccaaggtcgatgtggcaaagcacatattctggcaaagacaccaagatgtcagtgttgtagaattcacaaatagggaactgagtaaaatctccaagttgtctgtctgcatcatccgagactttgaatcctctgggccttgtgagccacctcccctttttctgaagcaaaccttccaccttccaacttcttgcacaagaattgatcccaactagaagtagcactggcgacagcagtgaagtgcttctgttttgtgccctgcgtgggtgaggaggaagggaaatgcgactgctcaggtgggtgaaagtctcggtccaacttttgaagagaatttgacagtaactgtcaaatataaaaagcctggacccagcaactccatcaataaggattcatcttaaggaatgagtggtcataggaaatacaacaataaagataggtacgcagttaagttcatctcaggattgttcctgacagtgaagcattggaaactgcattcatgttcctcagtagggttttggttaaataattgtgcaacaccatcacagtggaatacacatttattgaaaaagaatgttgatgaaatcttaggtttaaagaaaattgtatgctttaaaaaactttaaaggatatgcatgaaaaacatcttgtatatatccagttctctcccctagagcttcccagctcctgggcttaagactgctcagcccctcaaagccaaagtcgggagcctgttacccctgagagccagagacaggcacaacagccaggcagccttgcttcctcgaccatgagggtaacagtgatgatggcacttaacactgcagcataaaccaggctcgcttcgaaacacttgatgtccgtttgctcattcagttttttgagattattttgcagagaatattaatgtaatacacattaatatgcttttcccagatccactcactgagcccatctggtggcctgtctgtactgacctctcctgtaaccaactttccccagctggtggccttcctgtcc

SEQ ID NO: 101 - DNA, 325992 bp, Homo sapiens
  source 1..325992: mol_type = genomic DNA
cctccccactccccagagaatttcttagaaaacaccttccattcttctcagggcagaataatacccagtctgacatccagccccttgaagctaattcttccaagaagtgcagctccctagaatggacacagcaggctgtcacttggacttgcagccctgttgaacagcaaaagggggttagtttaggggacattcagggtctcctcagtccctctctcggaaccatgtccacatttaggtcaaggctggaaggccttcccttatttgctgatacacgaagatctttctctccagcctaatgcatcacaggccaacatcagaagcacagatttggcccctggccctgaaaagagagatgggaggagaggatggagcatgggatccaggcactgctctgtagctggggctctgagctctactctccataccctccttcagaggagacaggtggggaccgaagccatttccccatctcccacagggggacacagactgacaggcagtcaatgacccttgtttctggggccttgtcttctctcctccaggcatctgaaccttgcagcttccctgcccctcacttggcagccctcctgtctcagcagtggagagaggtgggggccctgggaaagagttgcccgttcctagaccagactgcagagctgagggcaggggaagggaaggaggtgggatagtgaagattgagaaggtctgtcccaggccaggactgggtgaaggcatgcagctggtgtgcagctgtctgggctctcctctccagaggcctgccgcccctctccaagtcctgcgtggtgttcttcctccttcggaatgcttttccctcccaccctggcattcagggtctggacacctctctccagctcgtatctaagtgtaggacaggcagcatgccaggaaacgccccaggggagggcccctactcttctttctacatccttgcccccaccaggaccctgactgagggcccagaatcctgttttctccatccctgcaaactgccaaagcagcgggaggtgtggggccaagagcaagatgcttgctggtaaatttggagttgcatcctcatccttcttcctttattgtggcctcttccctccactgcctccttccctaaggtgtcacataacttccccccccaacccaacacttgctcggccttcaggtcgggtggcctaggtagcctcctttctgttctgcttggacactgtggccacctctgccaggaacccagaagaatgaatttgcagtggggactttcagagacacacaccagtccagagagattcttcctagagtggaacaggacctccttttattgttcccatcacctcccagaagagcctcacatgctgaggctcagaacgagggcctgtgtggcagattccataaagaggaccaaagctacttccagtgggcaagccttggggctgtgaggcacagctggccagagtccgagaggcacagaccaatgaagaaatatttttttaaactgtgctttatttagggctaagctggagaaagcgtcatccaatagttacagaaggttacaaggagttttagggagttgagtgtgaaaagagcagttgtactgaactgcagctgttttcttttttttttctttttttcttttttttttttttttttttacatctggacatcctaaaaggaggagtcaagagaaaaaaagaaaatgaaaaacaacaacaacaacaaaattgacagaaagaaaggaaaggcaggaggccctagaggaactggaaatttgttcttctaaagggaaactggtaggtctgagaacccccggcctccagatgacctggacatcaatgagaaggaatcaaggcagaatgccaaagcaatcttcccaagggtgcaaataaattataataaatatgttatactttaaaatatatgtgttcttaaataattcagtgttttttctgattctgagttttttaagcaatgtctttaactgctctaaagtcatttaccaaagataaatatcgtgctttcattaaatagttttccttgtttttttctctatcattacaattaaaagtcctacaaaatatgcaaatttatttacagaaaaacagagccggcatcatttaaacatccctgtttttcaaaattccttgtaaacagtttcagaaattcttcaaagattgtttatttttctctctcttttttaaggttttgtgtgtgtgtgtgttgtctagttgttttaagatgaaagttcccagttctcccttgcccggaaagtctctggagcaagcgtggaaggcgagtgaagcggaaggtgagtgaagcgcgcgcagctcccagagggaagcgagaggcgaggatgacggcggcggcggcggcggcgacccgggcgacgcgaccgttcccgaccgacggcgtggcctccaccggcgtcggcagccaggcgcccgcaggtgtggggcgagttcggcctggcccttggggacaacggcatccgactgcactcgcggggagaagggattgatgctctgtctaaactctacaaaagtacagtcctacaacatctgggattttagcagtaatgctaacttctataggttttttttttccttttttattttttttttttattttttgctttcctctaatttttcttctattatataggtattttaaacttttcctttttaaaattctgtacaactattatgattttaagagggggaagagttagaagcatttacagacttttcacaacaatgaccttgcttggtaagtcccatttgttcccctccttgttttctcacacttcacgggtgagttttaagatttgtgttgctttccccaaatatccaccaatttgttcatcttttaacagctccatccagacatagaatacagaaaaccataggaaagtgtcatagacttggatgagggtcatcaaagcgcctctcaaagtatcaaagaactattatcttgctgttttaaaagcattgaagcgttatttttcctttttttgttgttttttttgttttttgttttttttttaattttttattacattttttcatagaatcgctctaagctgtttcaagaacagccatgaggcaggaaggagggggtcctccattccccctctatttgacatagagctacacatctgcaataaaaagtttggtcctttggtccctaaatagctaaaggaatgacagatagagatgctcagtggcggcctctcagccgccccttggggaccaggccccacgcaccacttgccccagcctgcgtcaggcgcccgtgggctggaaaagccccgggatcggtaagcagcgtctcctcccagctcccagcccttcagcctccccgtctgctcgtgatattttgttttaaagttgccttttgtgtgtttttttctcatttttcttcatcttcttcttcatgtcatatatattttcccccaaacacgtgccctctgaactccatagacgctatactttccttgaagaaatgttacagtcacacagacagtgtctggagtcttcagcttgattgatattggctgatatgtcaaaggtgtcatccaacagttctcatttataaatatatatagagagaggtttgttttttaatgtagcccgttcagcatcctgccctaaaatgaagaaaatcagggctgattaagccaagagggaaaacacaaacagcatccaaacaccaataggaacctgcctcaggggctaggatgggagctctaggggatggtgggagggaaggaagagagaccagtatgagaattagtcatgatcatgatacattaaaaagaaatatactcttctattcagagtagaaaccactgggaggtctagtggtgatggttgtagctgaggtttcgttgttgggagaaggttcttgatttgggttactttagcattctggattgggggtagctacatctaaggggagaatttgggactgcgggatatgaattcataattaaacttgtctctgagggatctagcccagatacaatatgtatacagaagcctagcaaacaagataggaaaaatctagcagcccagcccactcctcccagctcaagggaaagaaggaagacacatccgtgactcaaattttgtagaatccttgcccagcttccagccaaccacttctttcccggggtcagtaactatttgcgaggctgtgtatatatatgtatatctggatatatgtgtagaatatattcacctgcacatatgtggatatacatggatatgtgtgtatgtatatgcatatatacacacatacacacacataatacttttctcatacatgccagggaatttagaggaattcagaacttcaagggagtggatgggaaaacctaaaaaaggtcagaagagatttaattatcaaacttaaataaattaactcagacagtgcttgattttgttttgaatggtggctttttggtgttttgttttgctttaaaaaaatcatgatctgactagaatcagaaggcgaatgcttaatcattgtgaattaacaaatgagactcatctccattctagcaagcagcttccacttatacatgggggtgactggttacatcaagaaagttagaactgcaaagcccccacttgaggggacaacgtcatgcgtatatcaatccatgctggcaggtttttcacactgttgattcaacaaacagcaaaccgtacacagcagtctaaacaattacaacaccaaataaaataataataaaattaaaaaacacttgtcaaggaccctttttcagttgtaaacaaaaaggtgcattttgcttttgttagtactgtttcttccaaaccaaccaaaaaaaaccctcccgagcccccagtccccagcctcccctccccacatttaatttagcagaagtggttacaatacaaaccttacaattgttaccgggctctcttgcagaggcctctggctttgtactctagttttttggtttagaatttttttatcattctgttactgtagatattttgtttttgtttttttgtttttgttttttttccctttgaagtgagattgaaaatagcctaactggaaaaagaccagacctaggaaagtgtcaattgaaaaaggcccccaaatttctagaaaaaaataaaatcacaatattttcaagtgcaagtaaatcaaccacgcatagatatttttaagatgttttccttatttttaagaaaaaaataatggtttgcacaggtaaatgatcccatgtttgataattcaggaattcatctttattttgactattttttgttcttttgttttgtttttttctctatgtgacatctagagaagcataaaaaaacgctgaacaagaaaaaccaaacaacagaaagtaaaaccactgcaagcaccaagaacgaaacgaaaatgagcacagcaaaaaagattgtggcagcacaaaagtcaagaaaatgcacgtgtgatcatgactggccaatcatcaactgatacaacatccaagaaaaacgctccaatcacagcacctccacgaaacttgacggcaattgtcatgcaaccgattcttagccttgttacatgacgccatcatgtcacactgtgaactttgagttgatttgaacttacggatgggggacttttctccactctcatgtgattacgtgaactttattcctagctcagcgcgagactgtggtggatttgactggccctggttgggttgttggaatttgattgaatgacaaaagaagaaaagatttatatatatatttatatatgtagagagagagagagagaggacaagagagtgtgggtgggggaaggaagaggtggggcagggcaggtggggttggggagtgtgggagggcagggagggctgggatttgggtgaaggagggcaaggaagaagttaaaacaaaattaaaaagaaaatatatttatacagcaccagaccacagcatcaatctagaagctctgatgagagaacagcagtcaaatcataagagaactgaaaagaactcaaaggatggaggaagccagcagacaaacatgggcacatcaacacacacacacgcacacacacacgcacgcacacacatacacacatacacacacacggttgtttatgcagacacatgatacactgtgaacagaagcagaacctcacacagggccactaagggcatccatcatgcgttggggaggggggcatgggcggtttggcaagggggccagaaaaaaaataaaacagcccctcaaaccaccttggccagcaagcaatctcagggagcaggcgctctgcttttcatcacccttgattctttctctcccccaggggtggcgctccctccctcctcagctttctgtgactacagcctgtgggccagcaggggatgtctgtcaaggtggccctggtcagctgggtaggtcagaggcttgctatggtaactgctgtgtccacggggtccatctacaaaatgctttgctgccatagtaccacccaggctggcagcagctcggccctcccaccctgtggacccaccctggccaccatcctagagaaggctgcaagggcacccactgtggaggttatggccctcccccgtttctgctccacctcaaattactttcctcagaacctgagcagggttcattttgagatttagggtaaaattcatcaatgttcttggaattctagaaacatgccttggcactactgagttcatcttgcatttgccttaccctctttctttgctcacactctttgccttgctcccaagtggcctgtgtaaccaaactgaggctgcatctaggcacatgaagcccttcgaaggttctgcagccctgacccataaaagcgccacatggaaggctggagggtgccctgcagggggccatgtgcaaggctggagggtcccctgcagggggcacagaggcgagcgcctccagcctttgctgctcccactcttgctctgctgacttcccctcctccctaccccatcctcttttcccaccctctcaccccatacccctccaggaacagctttccagcctggcccaccgcaaggccccaaccttcagctttctttcctggtggagccctaagtagttgagaatgagttctcttcgctatcaggaatcatcaggtgattcaactttcggctgacttctccacccctcaccacttcatagtcctctgctgcacctgggcccctttggggtccttagctccacccctccccatagttatcttgagcttgcactggattccctgctcccctgtggcactcaggcctgggccaaggcctgtgtgccaggttgatctgcaggctttccagtccacaggcttctacatacagcagactttcactctcagctttatgctttcctgcagggagggagggagggaggaagggaggcctgggatcttaaaatatcactgtggatgaggggcaaagaagctgagcccaagcccggcctccagctcaaccttcacagaagcaccctagactcctcctctgcagaccccagcctgcctgcccaccagggctgggttctttgctcttccaacactggatctccttcccccagatcagggaccgtcccatgcccaccaagtcctgaaatgccacttccaactcctcccagaagcccttagacccacccaggatggccaacgggcagctcccgttggcacgggagaagaggcctaaggaactaaggagggtattgccatcagatgggggctgtggcaactgcaactcagggactccctgggactctcctctttctccctccattccagccctgagcccttcatgggcgtttactccttcccactctgcctgctcctctcccagctttagagtgcaaccgcttgtcagggccaggcactgtcctgtgtactgcagcacaaacctgaatagcacacagcccctgtccctaaagctcaatctagggaacttcctcacacataccctcatctctcacacatgtgtggccctagacacataacacaccctcacactcagtccctgaggagcccccaagactccacgggctcagctggctactgtcttcattaggcagcagctcctcttctgcctgcagggtgaccccttcccgaccactctcggggtggaggctcacagagcacagccctaggtgtggcagtgggatcactgaccggcatggtgaagtccaactcaccgagctgggtgaggaaattatggccaagctgaaccaattcagatctcaggtcctaaaatcagctggtctcaagcaaaggagggccaggccgaaagctacagcctggccctgtataggtcagacccaaagcacctgtgcctgcaaagcctggacccgacactctccaaaagcatactcagagccagagtcacaggactcactggggtcaggacaagatgcttggtgcactctccagccatagaactggagtgctagaagtctgagaacctggcctgctgctggggcccagtgtgtctggtaagcagtggcggaacaaggggctcagaggccaatctctgagctgggcggggccaggctgggtgtgttctgcccgctggctatggacctggccacatgcatgtttttgcctactcttcctgcctttgcttccttccttatttatttcctggcaaagattgcttagagaaactccagtcttagcacaagacaacaaacccaagccaccagaggggtagggcagtggggaagcagaaaacccgccaggaaggagagtcactgactccaaccctaatcccaccccactcaggaccttgcttcatggaaccaaagcccaactgtactccccacagctgccctgcctaggcccttctccctcccctaggtctgtccccactcccttctgacttggccttagaaagcctgcaccaccatggggcagctgccctagccctgaggtcccccttccacctcccactttgctcccagctatggctggtccctcggcccctgctcaggcttcctgcccttctgagcacctggggctgcagctcaggcctcagcacaaatgaataccctttactggcctgtgataccaggcagtattttagctgattttttgtgccttttcctccctcgctggcagtccgagggcagccacttctcattgagccactgcctcaaggcagtccccaaggctgccttgagaagctctctatctcttcttagcaaccgccttctattagagcttccaacagtcttgggctgggaagcctgacagcaccattcgttaaaatactgtctaaatgaaaattaaatgtcaaccttactgtaggagttatgtgacatagtagttttttaaaggactgcttagtagaaaggaggtggttagatggctgaccccagaaaagtgaggtgtcatatgtactccctcaggacattcagggtactctggggtaataggttggggtgagggtagggtggggcttctcattctcctcacttgaaggggagaaggctccctggcttcaaagcttggctctgtgactcactagctgatgggcaagctacttaatctctctgtgccccatctgtgaaatggaaatactaacactacctaccttataggtagttgtagctatgtagttaacatctcctagttgttacttctcggagcagtgcctggtgcatggtaagcactgtgtgaaggtctagggttctaatctttctgccctttgcatgccctggtggaagaaccgactctgtgttttaaaccactcctcccaagcccccaccccaactctgaatgccagctggttcaaccctgtgggcacttctgaccttatatcccaaacaataaacctgccttctcactccttcatctgggaattcttctaacctagaggttttatcctggcttgagccaaggaggctaagacaagctactttcaggggtgccccttggaatctcgggacatgaccctgcctgattcatatccccctaacccccaaatcctctagttgactctaacaccttagtctcattaatgagaaaaaagaagcccaaagaggacaagcaccctaacccaggtcacaccttaatggcagagctatgctgatttaagaaaaagtgtcctatatacagaaaaagctgctttcacgaaaccgtccctccattcctatggaaatgcccccatctgcaagctgcctcctggtgtctgtgtgtgcacagagccagaagctcctcgagggcagggatggtgactcattcatccttgcatcccccacactgggcccagtgcctggcacaagaaggtgcccaaactctgaataacatgtgtgtttgcatctggacacaagccagaaatgggcaaggatgggaaacaagccagaaatgggcaaggatgggaaaccaggaggcaggaaagactggttttgcttttccaggattgcagagagtggaggcacaagcactcccccagagagaaggcccctgctctctgagggtgagagttgctacttctgggtggaggaagggtgttctgctggtatctgtaccccagcactgggtggaagatttgaggggagactgggaagctggagacctccctcccaaactctggactgtgaaactcaaatgtgtatttttcacatgcctgatctttctcccaatccctctgttcttccagtgacttgggccaaaagcctgggactcatccttggctcctctttcaaaatacacctagaaattaattccttcacatctcatcaactgctgtgacactggactgagtggtcagtgcagtagacctatgctttggccccctacaagctattgtcaacacagaagccagggtgaccccactgaaatgcaagttacccatcactctcctattcagaactctccaatgctctctccatctcccatttcagagaagagaccaaagtccacgcagtggccttcaaggccccacaccaggtggccctcctcactctcccagcaacccagtctcttgctgttcctactccactctgcagccccaccttgcagcctccatactgactgttccctcagaggcgggggcatggctgcttccctcaccttctatgctccaattcacttcctcagtgagatctacactgaccatgtggtttaactgtagccaacaatctcgacatactagatcatattctttgatcacacgtcattgtttattgtctgtctccaccttctcaatcttgctcactgctgaaccccaagtacctaacacagtagctggcacacaatactgctgaataaatggaggaacatgggcagggaggggcggtcagagggcagcagggtgctgagctggaaaggcccgaaaggagccttcacctctgctctgtgaagaagccgaggctgcaagagccacagcactgggggaaaccattctgaaggttgacttttgatgtcctggggaatctccccccattctttctgcaggaagaactttgctcaggggaacacgtgggctggaagaggcgtggctgactgtgtcttcagctcctaggcaggacccagcccagcagaaaaggtaacaacgaccactcatcatgacccgtgtggggcaggcagggcccgggatctcagtgctgtaccatcaccctcctcagctttcatcccatcctgctttgtttcttagtaaagttccctttgaaagatcctgtccttcctctcttcactgagctatggggaaagacaggggtgcaggggtcaagtgtctaaaggctaccagccctcctggaagaactggggaggagagagccgggggtctgggagcaggccccgcgggcggctgcagctcttctgggtagagcctgttctgcccccaacctccctcagcctgagcttgccacctgttcaccccagggttctctggccaacaggactgccaatgtagacccggaggcgcaggcccagggctcgcctcacccgcccggagtggctccctcactcctgcccctggtggccctgccacagggaaatggccaggcccatttctgccggggtgacggcagctctgcgcctggcccgaggagcagggcgaggagcaggttgagccgggcgcagcgggtccaaggcaccagtgagggtccggcccacggaggccggaggaggcggcgggtccgtctggttccctcccaacccccgtccccgcgccccggccgcccccggttacctgtgcgagtcctggtctcccccgggggacgctcccgccggcgctcagtacgggcgattggcgtctttgggccgcttcagctgcaccttgagcctcttcatgccgatctggaagccgttcatggcctggatggcggtctgcgcgctggccgggttgtcgaagctcacgaagcctggcgagacacgagggacgagggcctgggtttccacggggccgcccggggcgctgccggcggggaggggtcgggggacaggggggcggggcgggcctgaggctctccccctcgggccccgcccccggccccgccccggtgcccgcccctctccagcccgcgcgcgcgtgctaggcccctccgggggcaggcgctggcggggacccggctcgctgacctgcgcctagtctctggccgcgtcactcgcccggcgcccgctccccaagtggggcccgcggccgggcggcgctgggagaggcgcccgccccccacccccgccggccccggcacctcagccctcgcctcggcgggagagggcggacacacctgcgggtggaggagtttattggacactgtcctccctgacaggagggggcctggcagcgcgcgggcacagggtgccggcctggggagagagacgagtgcgaggggccgggagggaggcgccgccgagaaacttctccaccgccggcccggccgcccccctcgccaccgcaggtgcccggctgtcggaggaggcccagaggctgagccctcgcgggccctccgcccccactcccggcctctgcccgccccgccaggctccgggtgggccctgggcgtcacctcgccccgggcgccgtcggcacctctcttctccacgccctgcgccgtggactaagcacgcaccagctgatatgtccataacaagtcacaagaccatcagtgcaaatcaggccacagccctccgtgcagaagcgcttcccacgcgttcactcctgtgcccagatggcatgcagaaccttgcggctcccaggcccaaccgcgcaggtcccagatgggcacaggtcatgttcccaaaatgaggtcagaagtcacctttggggaactctgaatgcatctcttcatacagacaacattttacatcagcatttcccaaactggccctaataggtgctcctcgagaaagggcttgtgtggtcaggaggtttagagccaggcccactgggccagtgcagcatatcaacaaataacgtcccctccctcaccgagttgtagtaaatgaacctttatagctttgtttaatctagtatttccttgaattcattcgactttagaggccttttctcctgtaaaaaggacttagatcctgcaaaatatatgaaagcttggcgagatactgaggcgttcccatgaacgtgcccgttgcgtaatggtccccaaatggccattaggtataagacagagatgcacagccacccgggagtgaagtagaagccgtcttctcagtttattgtctgtggtacctcgggcctgccttgggacttctctccaagaaagagagcccttcctcactttccctacctgctggttctttttccctctttccctctgccccagatgctgcctccatcgtctctttctttctctcctctccttcctgccttgctcaagtttgctcctacagccgaacaagcgcaacaattggtcagagctgggcccagagcaacaaaactaacctctgtataaatatagataccagaataaatagggagaatttcagctgatccatacgagattcgcctccagccatatttccaccagctcccctcagcccctcctggcccgtccccacctccgctgacctgtatgtctaatcactaaagtcaagttacgtcaagtaaaagtcaagtacttagtaaaccagagcagttttcaaatatgtgaattgtgtgttgatactgctttccccagaataaggaaggtggctggacaaaagcctgtccctgccaggacaaggtagcctgactatgggggacatgctgcccctcattcttctcatcatccacctgagctcaaagaagggaggggaaagaagataaaaagggctggaggagctgtctagggcacaggcgtagcggcaggcagaaccactgtgtggggagggcagagaggaagttctggaggagggcagaagcccagccttcctggaagagtttagaggtcctcggaagcccgagagttgagaagcagtccagggtcaagggaatttttcttcccttgaactgttagtaactggctagcagtctgagcagggtccctcccctgcagactggaggcccctgtggcagggctctgggcactgtctcccaagttcatggttccaggaccgtcttccttcttccagagctacctctccttccctcctcctatcctcagaaggtttctgctcccaggccctgtgggaaggcccgcagatagaatccccctatggtattcccccagccctccttccaacataggaacatttgtgctagacatgccctcatgaaggtatctggaagattctgctcataaatttacacatgtgcttataaagagtgaatgtggcctttgaggagttcactttaacatagggccacttttatagcaaaaatagcactttaagaacaaaggggacctagcacttcctgagggtctgccctgggtaagctccctcacagcatccctggggcgatgattaaaatccccttttcacaaaggaagagattgaggctcacagggttaaatgacttgtccatgagggaatgctgaagttaggtatcactttattttatttttatttatttattttgttatttatttttgagacggagtattgctatgtcaccaggctagagtgcagtggtgtgatctcggctaacagcaacctcccttcctgggttcaagcagttctcctgcctctacctcctgagtaggtgggattacaggcgcacaccaccacatccagctaatttttgtatttttagtagagatggaggttcaccatgttggccaggctggtctcgaactcctgacctcaagtgatctgcccgcctcagcctcccaaagtgctgggattataggcatgagccactgcacccagcctaggtttcactttaaaggcctctgggatattggcagaaagctcagctgcctggtgagagagagaacccaagtggcttaaccaggaacagctgggctggaccagcatctcaggagtctgtccttttttcagggctggtatgctcgacatcagaaatttgttcaagagaggagagctagattagaggtatactaattagagagaaaaaaaaactgtagtcctggctaatttaagtgggctaacagcttaaagagggtagtgcttagagcagactgcaaggaaatgcctttggaaagccggactgcacccacacccgggatggtgcaaatatgccaagcccagctatggctggagactaaacctgttccagcagaggcgcccagagcttcctgggctctcagcagcgctcttctcatttatgtaacatttgggacttccttaaagagcagatgcaactgatttccagcttgttgtttttacatacataactgtaattcataaggagaaataccaaagagtggaggactgcaaccctgtcttttgcttctgctttgtttttccacacccagagagaaatgagctgctggggcaactccatgccattgaaagaccacaagtttcctgtggcagctccagaggggaagggacaatggtgcaaagatcttgactactttggggaacatgctccgaatcctcaagcccttcatgattccagaaggttggactccagactggaaactccttaacatgcgcttcctgatgctgcactcctgtctcctctcccctccaccacccccaagctgtgacctgggttccttgcaactcaacctcctactctctcctcccagccccagaatctgggggtcagcctggagatactgagtgtctggcagactcagctctggttccatatgtggctctctggggactggactcttcagtcctcatgacttacgaaagggtctggcccagaaggaacggatgaaggagaaggatgaggaggtcggagggcaacaaggaggagtggaggagaaagggtgatatgaaattccaggaggaggtctgacgcttgctggatagggttgccagacttagcaaataaaaacacgggatgccagttacatttaagcttcacatcaacaataaatactttttactgtaagtacatacttatactaaaaatgtatcctttgtctatctgaaattcaaatttaactggccatctatattttatctgacagccatacttctggatgctttcgagttttccctctcccatctaacaccatgccctgagcacatttcctgcaaactgtatttttattactctcagctcaaggacctcccaccatttccactgcctaccacaccccgtgaaacacccccctctgcatagtggaaaccccccagcacagacaccacacccccgcgcctggtctccctctcactgtcctctggctcgtctcaccccagccccatgccttcctcatccaattctccccacgtggagttccctcccttcctttttgtgtatttatatccatctgccttccttgtcgtttcattattaggtgcctcgcagatttcactgctataaacataattttcatctaagctcagcgcttaggcttcctgagggcagggaccagtctcctcttcctgactcctcaacaatgcccagctctggtggcctgaggcaggtgagtggggagggcaggaggggagcaaaaagcagggtagacagagaaggagttggggcaggacagagagctggagagaggaggcgaaggggtgggcaggagaggggcctggctaggtgactgccctgcccaggtgtcacgctctgatttagcctcgggctcaggccaggccactctcaccatgagaggagaggggctactgggggaatgggtgtggctgggctctgcctgctgcccctcctacccctgtcaaggtggcccctttcccttctcagtaggttggaatttgtctggaagaggaaacccatttcttggaccgggagtgggagatggggagccaggttgtgtgggtagggaaagccaagaagcaaaaggagtagtgggagagagaagggtgagatgaggctggtgagggccatggagcagctggggcgggggcaatgtgaaggagcaggttaaaagcagtcggacaccggtaggttggtgcgagcaccgccctgtcctaggtgaagctaattggtttgttatctttacccaccaaagcatttactttggttagtcgcccgatccacaaacactttcgaggagatgacattaccgaaagggaggaacatctgcatcagctcagcgtccccaaactcctggggcagatggtagatgaacaggttacagccctcgggccctgcggtgaggggagggggtgggcgggggaggagggatggcagggtgggggaagagagagacagaggagaggtgagcgagttaggcagcgcagcagggaggggtgggggcaaggttaggagggggagtctcattccagatccaagggcgccccagaagaggcagggatgctgagccccgggtctgagctccggtctctgctctgcccttgggcaagtcactgaacctctctgtgcctcagttgccttttctataaaatggatctgtagcagaggcttagaaaccctagggctccagaggcggagtcgacctactgctgtgtctctggaaaccaggtgctgaagatagggaaggcccaggagatccgggaggcctccctcctgccctgcccctgctctggggggaccagggcatcccctggggcagccaagtcctgtgctggggagaccccccactttcccttctcgcaggccagtctcagactctgggattggggtgcccatcctccccctggcctgcagcctctctttctcatctgcccctgatggcccaactgtcctgcccagttccacacacccaggaaaccaagatttatcctgcctcctcctgtgtaggtgcgtaggaagcgctgcaactgaggctctatgattagccagggaaccctccagcctcatgacatgaaggttcttcatttcgttaccacagtaacagccctgcgacttcagcagcacaaactatgtgtcaggctgttctgagcactttacatgtctctaactcacttaatccttacagcaaccctgtgacattattatcatcattgccacttcacagatgaggaagtgaggcccagagaggttaagtcacctgccaaaacacgcacagctgggaggggcctggagccaggacatgagcctagcctgtctccatagagtgaattctttccctcttgctaccaaaaatctcaatatcccagatcccctgaacactatgcagggctttagctttctaaaattcccaataactaaccatttacctgtttcttttgaaatagtcaaaatgctcaattttaactctttaaaatggaaatcgttccaagatgcgtcttagatagcatatgccacatataatttcatcttttaaagtgacttgtggtcatttcaatgatggtgtccaagctgtggtgggaatgggaaggaaccaactgcacctagtgttgtgtaagaagcaaggttctgaccagaggctgctggaaacctaggcatgagctcaacagtgaaggctgtaaggcaccaacatgggccgctgcatggctttcacgccagagccaaccgtccttgttctctgggagccatgaggctgccagacaacccagttctggagtaaaggttcgatttagagactctgcaccttctcttctgctcctctaccttccactctcctccttttctccatctatctctattccctcaaggtccacagcctagaacaaaaatttccccaacccctaaagctgcccaaggagccactggcttcctccctccttggtgctcgccctgtgccctctgcccaccccagcccttcggcctcccctccctggactgctggctcccaggcatcctgctgggggacggcgcattcagaaccgggcacaaacatgctccctcacccccttccaggggttcctggtgctggatacccccgagctctggtggccctcccctcaccctgtcccctccaaccatgctgtcttcccactggttcatgccctgtgaatgtgcccttggtggcccccagctccccataccctccctctctgaaagaacctccagcctctccctgctcatgcccgaatccacacttcatcctctggggtggggctctttctcttttatgtctagaggtttttctctccaaccagactggctgctcccaggggcatgctccttcttgtgtcctcctgcccagccccctccagccccccccacacctcccttcctcctcccatcctcactcttccaggccctgactgctccagcccatgctgacacctgccttgacttggggccctggctctgagttcaagttctgcaagctgctttatgtggaagctacatctgttctccttagagataaggagccttcacagacagggcccgcaggctcaatcccacatgcgcggtgtgtggcggagccccagggatgactctctagcccaggcctgacgaagaagccagggcagcagctctagtcccttcccctggacagtgagcccacacgctgtctaactccagctaccgccaagcccttctgcactccctcattcacagattacagaacatgcagatggcagagctggcaggactttagagaccaatgtggtccagcccagccttctgagaaatggtgaagcggagctgcagagacagaaagcggctacccctgaccaccttgcagccctggcagagccgctgcggcagccatccctgagggcaacctcatcccatctgtggggcagatggcctctggggaattcaggcatctgtctgttttcaggctcagctcaaagatgaggaggtggcagaagggtcctcccctgccaccagaatatcctggtatttccatgacattccacatggggaggggaccatgacataaagaagccaactcttggcagggttggaggaacacagccttctttcttgttcatgactcggacaactctgtgggacacggctttggccaggctccagcccaccttgcgcctgtctctccctggccccatgctcaccttggactctgcagcagctgcacttttaatcccgctgttccccctgcctggacctcctgcctccccagctctatgtgctgccaacctctgctcatccttccagacccacagaagccttcctgacaaaccactcccagtgccgcgctctcacccgcccatgctgtgcggctctgttggtatcgtgcattactcttccccatcccctgcatccctggggtggctcaacccatggaccatggcctgggagaatggggacaatagcagcagatcctgccaccccaaggagaggctggagccaggactggccacagagggcctagactagggagcaaggtgtgtgtgtggggtgggggaggggggggcaggaattgcagctgctcagagatggagagaaggaatgaggaggagttcagagctacacatatgggatggtggagtgtagggtgggagaggggcaggagggcccatgggggcctcagtttaaggcctgcagtaggggctgtcatgtgtgttgggcagggtgccattgacctacggctgtgtgaagggtggggcaggatttagagacccctgagccaataggccagagtgattcagggagctgacaatggcaccagtgggagaaaagatatcagggcctgtaggcacagctctctgttctggacctggagcgggcaacatggggactcctggaccccaccccttgtggccctggtcttactgatgaaggcttggactgtggggaaggcaagggcaaggcaggcccagggctgcagcctgatgaggggaccacccccacccccacttcaccagtggtagcccagtgtccctcagctgcagcagcgtgaggcagggtatgggctgggccttcctgtgcacccctctgggttcctgtaacttggctttcctgggcatgggaagccctgatgcccctgatctcagaagttgcctgctgggtgtgagctggggtggtatgcctcatgcacagccttggaaggggtggtagcttggtaaaggaagggcagtgtgcactgagaatggagtttgggggcagactcagccggcttggtcctcacacccctccagagaacgctccccactctcctcactttgctgtgaggacactgaggctgaggggatagagtgatttgttcagattcacagggaaggaggtgccagagtcccacccaaaagggttttctctgaaggccaggctctcagccaggcaggctgtggcacctctttggggtctgagggacttgtctggcactggggcctgtcaaatgatgttggaccagcagactcttgaggctctttccaggactaacctacatcggagggctccaggacactatgctgcaggggctatgagtcaggattttggaggccatcggaaggctctgaccacatgggctgcaggggcagatttggtgcctcactacccagtgaccatttccataggggtagagaggatgggaccttgttagtgtcctgccccctcaagctgagctctctgtggcaggcccacagagtcccagacggtgcgcctgttcatccagcctcctgtcttcctgcttatgtgggtacctaggcactgggatgggaagacactgactggcattccgagatccctggcatctgacccaaagatcttgctgtcctgccctgttcacaccagggccttgggacacagctttccaggatcacccccttcttccactaggcctgtactggggcattctcatctcttctcaccctgcccacgcagtcctgccctgggagctccacctgcctctcctggtcacccagagggcacagctcctgtgggtgataaactcatctccctctctcattcccctcagccatgagcactcctacttctccccaccctccccactggccaaatcctgcccaccagaggagggggattcttggaccccacctcctctggggcttcccttcctgaccctctcagcctggttaccatcttttcctcaatgcacacagctatcagagctggttctgcaaaccaccatgttgttggagtctcatctcccagctattctccctgggaacacagtggtaggccctccagtgaagaccccaaggatgggcctctgtctcctctggaagaccagaaactccctgggtcaaggacaaggcctgcactggtacacacaggcctaacctctgctaggttctgcttaagggatggttcaagggcttgccaaggaagaaacacaaacccaaccattcagaaggggttctcatagaccaaggttttgatatgtgagctctgtgtcaggccagcagcaatgattgaggggagtaggaaaggtgcctcgtgtgggacctgccagccctcagggcattctgtccaggcccctgcccctgggccagacaccactctggtgtacagagctgtccacaagaagcggacctctacccttaagttggagagcgccactcctcacagcactgctgtcttcccttgcccacctcaacacagcacacaaacgtggtcacctttccaacgcacaccccagcccaaggcccaggtgagcagcctctttggggacaacagggggagggaggggcccaggagctggcctgcagactcaccttctctctgctgctgggggatcattggaggcggctgaggaaaggcctggcttatctgaccataggcagcagggtaggcagctgctggaggcccaagacaagaagcaagagccggcgacaaggcagagagtggaagcaggaagaaagagagagatttcagtgcaggcagtaaaagcagatcagccaaaaagcgccctgccactcagccacttaggacaaagccagctttcagttcccagactaacagaggagttgcaaggtgaagagtggaaatgggtgtgtgggtgtgtgtacgtgtgtgtgtgcgtgtgtgtacattacatgcatacatgcatgtacgtgtggggatgtgtgtgtacgtgtgtgtgtacattacatgtgtacatgcaagtgtgggtgtacgtgtgtgtacagtacatgcatacatgcaagtgtgtgggtgtgtgtgtacattacatgcatacatgcatgtgtgtgggtgtatgtgtgtgcgtgcgtgtacattacatgtgtacatgcacgtgtgtgggtgtgtacgtgtgtgtacgtgtgtgcgcgcacgtgcacttgtgtacatggtgttagtgcatgtgtgcatacattacatgcacacatgcacgtgtgtgtgtgtatgttttgggggaggcaagttgaatttcaaatagtggatgaaccacatgtgtgcataacacagaatcatggataattaaaaacaccaaaatggcctggacaagatcaccccacaccacctggaatccacaggaaggatttcccacttctctgagccacagctgactccagctggcaggccctcactcccactcaaacggcacctgtgtgggaggtgggggccacctgaggtgtggacttggcctctgggaaggctgccagggggtagtccccaggggcagaggactgagttggataaacctgattgtccaactggaaagggcctgaggtaggacaggagtggccggctccctcctctgcctggcctggctcccatagcaacagagcctgaagtcagagctcaggggacccaagaggtgacagcacctcctctgggctccagatgtgccaggccagcttcacctcagtcccctcaccccttgccaggtagccccactgcactcatgggagacagcactggctcttctaagcacagggaagagagaccctgatcaggtcaggcagtaggacacaggctaggcagggatgatgatggggtgctgtgtagtccaggggtgacagaaagagagaagcctggctgacagctcggcttaggctcagtgaccccaggccctctgctcactcagggctgtcccttcccacctctcctcctctgctccctgtcacacctgctggggccccatcctgctgccagtgtgtgaggaagggaatggggaaacggcatctcttctagaggccctccttctctcaaaccaggcatctgtgcttcctgggccagtgactgtggcccatggtgggcagcatccaggtccagcctcgcctgtggtgctggtgtcagacctggtgctcctgggcaaagtggccctggaagctccatggggaagggaaatctggcctcaaagacaggtaactgcccagcaagggtgaaacttccacctggcctgcccacttgcctgaagttctgcccaaccccactgcaggggcactctcggtggcccgctgacaagaaggcagcctggagggtctctgccagcacagccctccctctttccactctctctccccaccccatgcagtgctggccccaggcctgagggggcactggtgtcacaggcgtggagagataaacggagttggggaaggagccgtggggacgcgtggatactaacgacctgcatactgctgcactccggcgtaggcctgctgcagggggtccgcggcggtggggctctgtgctgtagggagccaaggggacagaggtcagcagtgcccaccacactggcccttcccctcatgcccatggggacaatgatgtagctgtactgccttttctggctactgcaggctgtgccctggggcagggcatccgagacagaaaccctgagtgcctggaccctctgggggtcaccttccctagcccagggctcttggcagggtagacagttgcccaccctggctgggggatgcaagctgcagttggcctagggctggggtaagatgggggctcatgcagagcactgtggagggttggggaggagatgccaaggaagcctcaacactgagatgctggtggtggggggggacacacaaggggcccagccctgcagaagggctgtggggaaaggggagggggctggcagcccccagtgggtgaaagaaagggcaagaaggcctcacactaccactttgtcctcctgggccactgtgcctgctcacacagagggatgcgccctcactgtcagggaagctgcaccaggcatggaggtcttccacccccagcccatggctaagttcctttcagcagggaccagctacgcaaatagggtcttcccagcaaactgggagaggggtgctgcccgcagaaccgaggaaccaggagaccaaggaccttcctcctgtcttctgacactgtgaccctgggatgtctcctgcccagtgggaagagaggtcccctgtacagatactttggcaagaaactcagggaagttgggctgagagaaaggcttggttcccttctgttgtctttgctgtctctgctgaagctgtgggcaaaagcctgaagcatgggccagcagtaggcactggttttggcgaccaaggctggtggtgactaatgtgggagtgggctggctttggaagcccagagaggtggtagaggcagggactgcccagagggaggatggagccctaggatgcttgagggaaaactggataacacgatgtggcaggaagaaactatctgggcttatccgcctgtcaactcaggccagctaagctaagtggccatgccaggctttgggacctttagtctagggagagtgcctcaacttccctcctgagcacgtttccctgagtatctcactaaacctccactagaaaaagggcacctgggctgggcacggtggctcatgcctgcaatcccaacactttgggaggccgaggtgggtggatcatctgaggtcaggagcttgagaccagcctggccaacatggtgaaaacccgtctctactaaaaatacaaaaaaattagtgggcatggtggtgggcacctgtaatcccagctactcaggaggctgaggcaggagaatcacttgaacccgggaggcggaggttgcagtgaactgagatcatgccattgcactccagcctgggcaacaattgtgaaactctgtctcaaaagaaaagaaaaagagcacctgggcctgaggggtgcccagggaaaagcctggggcagaggtccctagagacagtgggacagtaggttctatagcccccaggagcaggatgcggcaggggagtcagacccacgggggctctgctcagatggggggagctgaagatgagccacaatgcaggctccttcctgcctggggctgtcccagtcccacaccctgtccctctatttcccccatggtagagactggcgctgagggctcctcagtgtgatgtgcttgggagggtggtctcctctctgccttccctctgcccctatcctctgccagcctctaagctctatagaaggagaaccacgtccggattgtgctcttggtctttccagctattcatccatgcagtggctttatgcaaattagaaaagggtgccccttcctttgggcatacagtttggtgccctcatgcaaaatataacctgcacgatttgcatggcagctgccagcacagtgccaggaacatcataagcatctggcagagtatgatgaaaagaatgaatgaacaatctttaatgtttgcaagagccaccccttcaagggtgtttatgtgacagtaaaggccacactgtgtgtatccagcaagaacccaagaggggagatcagaaaagctacctggggcagggaaacagaaaaaagcatttatgagacccttctctacttctctgcctaacgacctcattagtaactgccaaagagtgaacattttgaaggatctcgctcattacagcgggtccaaactccgcatttaaagatggtaaattaatttttttaatgtactacttttttcctttccttccctccatccctccctccctcttgctctggcaaggaattgtttatgagatgtggcagattgttacaaataggggaagaaacatttccaaattccatgagggaaatagctcacagatgccagagggggttgggaaggagcaggtttatcaggatccagagatccagatgggcttgtgggcaggaaggggtgggaaatgaagccacccagatgtgctggggatgccatctcccagcccatgagccttagactggtgggatctcttccacccccagcttgcacagccccaccctgccaccctaccagcttggggtcatcatccttaaacaacactccagatcattagagcctcatcacttcactctctagactcctctggcctcttcttggtggattgagggatatattatggggcaagctctggaatggggaatgggattaaggaaaactccaagttcaaagtcaggaaattctcctctatttccctctagtacagtgaccttgcactctgctgctagtgggacttttatatactacaaatgcctggtctgcactctagacagggaaatgagaatgtctgggcttatgtggttgtataaagccccacagtggattctgatgggcacccagagtggggaacaggacccagcccctgctgccaattcaccttgggctggcctgcctgccgtgtgtgccaatctccttaccacctccactcttgccaggcaggtccctccaaaggagggtgttccctgttcatcttcacctctccaattcctgcccatctgttaatgctcgatggtagtttcctccttgggaaggctttttggggcttctttagcctacagaactgtccattcattgggatctttagcatttcaagtctgagaacactcactcatgatcaaacttaattctgccatattgtctcatcattctgcagacttagattgtgttcccaatggactctgacctcccaggcgataggtccatgtcctgctctacttcttgggcccccctttcacagcacaaactgagtacttactgatacttacggggactctaacctcatcctctgcctccaggaagcggggcggcactccacatcgggagcacatttcccttgtagtttactagagggctttgggcccagcttccctgccctgatagcagcccattctccagaccagggagaagagctgcttcaggccaactggacactctcaccctgtgaggacggctaagtttgaggaaaaaaggtaatcaggagcaggcctcttggatctttccgtgtgccagactatttgaaaaaatagtctaggagctgtccaaggtgctgggctgtctgtggtgctgacctgtccatggtgctgatcacgctttgcgtgcaccatgatcgcgcttttgtgtgcaccaagggatggactggtctgtactagacagactgccaatcgttatacctccctccactccttcccaaagagtcttttcctacttaacactaaccctgattgttcttctagtttctatccccttacttcttgtaggttaaattcacactcaattattttgcacttactggcctctctacatggttgtacaactgcacccagtctcctttcttccctaagggagcacctggaatggggatctgtctcccagatcagaatgacatatccccaagggcaggattttggtctcattttttccatcacgggctccctgaaggaagatgggaggctggccctctctgatcacacttggggtttcatcaaggaatggacagagggcaggagccacatcttgttataacagcaagggcagggacagcatggataaagaatgtgctgcatacggaaataagtgctgacagatgtgcttacctgggtaggggtggatgccattggcgaacacagcttccgcagcaggttgcccattggcctgtggggggaggccggtgaagccattcaccccaatgggggatgggatgctaggcacggctggtgcagtgatgcccggaggggtgctgccacctggttccaggcatacagaagggtggaggaggaggggaggcaagcagaacaaaggtgaggaaggcccacccataaagcttcactcaactgtttccaaggacctgcggatagacttggacctcacataccagttcaatcttatctatgacccatgccttggcttatctccctatatgaagtgacttcacctatcccaattgtatctatccttcaaggcagactccaaattccacctgcccaaataagatttctctgaccctgatggcttgtccttagacagcacatagactactctcagtgcccttgactgtaaccacacttggtcttccttcagtcctttttttttttttttttttttttgtcttgctctgttgcccaggttgctggagtacagtggtgcaatctcagctcactgcaacctccacctcctgggttcaaacaattctccttcctcagcctcccaagtagctgggactaccagcatgcaccaccaggcccagctaatttttgtattttttagtagggttggggtttcgccatgttggccaagctggtcttgaactcctgacctcaagtgatccacccgcctcggcctcccaaaatgctgggattacaggcatgagccaccgtacctggccttccttaagtctttttcagtgctcttactctcttcagctaaggctggatgagctggtctttacttggtcattggggggctgatatgcctctccaggaggaagtttttctgctcagatggagtaggtcttaattctggccttctctcgtactgaggcagagaggttattacagagcccagactcagctttagctcatacacaaagtagacaccttggcctcctccacttgaagcaatagtagtggtcatgatggtgagaataaagttggggtcaaatgacaataccctgtgtcctccctatgccaagtgggtggaacctgagatgtggatattatggtgattgtactgaaagcccagaggctggaaagggccttcctctcatgtaggaagcagggtccctctgagaatgtggacctgaggttggccactgcctgggctcatgtgtatcccttgaagttggggatcagaggtgaagagtagtgttcaagttgagcccagagatggcacagtctttttggctttcacctgggaaaggaacagctcttggatgttaggaaagttgctgctgtggcctgggcacagagagccaaggaagctcagtgaataagagcctggggtgcaggaccagcccttaggactagactagcgtttctcaactttgacactattaccatctggggccagatagttccttgtggtggctgtcctgtgcactgtaggatcatacagcaatatccctggcctctacccactagatttcagtagcaatccccactcccagttgtgacaatcaaaaatgtctccagacattgccagatgtcctggggattcgggggcataactgcaacagctgagactcactggactggacaatagccaagattcaatcaaaaacatgatttgtgagctgggttctttccaaactcctgtcccttgataactcttgtggttctctctagcttgttgcatagttgtcttagaaaaagccagtgagtctagattgggttaaagggaaatgaaaaaaaaaaaaaaaaaaaaaagacgacacccaaatgggttccttctgtgcttgggccaggggctgaacaaggccacagaatggccaaggctcttctcatcatagacaccacagggagatgtcttcatgtcaatttctttccaggtctcttgttggtaaacatcaagatacattgtttcctgataaggttaaacagcttgagagaaatccaccccaccctgaaatcacacggtagactgcatgggtcccatatctcatcttcccttggatccccatggattagaacatttttgagacaaactgccagaaggcaagtcctctcgggcccagacactatgtgcttttgccacagaatggtccgctggtagctgaaattaggtcccagcctggggccagctgttctcccaccgggccagaccgcgtgttggcacctgccagctcacctgaggttggggtcataggtgcggccgccaggccattcatgttgagggccgccatctgctgcatctgggcggcagcgaaggcagccatggggttcaggtagccgccctgcgcgactgatgccatcagggccgcttgctgctgcatcagctggggcagagggagtggaaaaaatatcacgtgcttccagggggcatccctccccgacaggggcctcagctcctggagaccaatctcccaggctctgagccccagaagctcccaactaccactccagaaagccctgatgcctctcccattcttgccctgtacctcaacagctattagagtccaccaccctgagagatgactgtatttaaaagtaatgctagggtctttggaactccaaagttgttgctaggggcagaggaggagactggctctgtgggtgctagtcagccctgtgtacagcctgtcattcgtggggaagtgacatccaaagcactagagacatgctggatgagcctctgcagaactcacttagcacaggtttctgtccagaatggttttaatttggagtctgttggtagaagtgacaggagaattatgaatagaaccccaggcacccctagtgttgtcacaaaggtgagtgcggacaggggaggctgcggaatgtggccaaggcggacagtactgcagaagtgaggtaagcttgcattttcagacccagaaccgtggcctgcctcagtgccacccacatgggagctgtggttaccagtctgcaggcagctccgggagaggctgacagagtgggcccccatgtggaagaaagaagtaggtgggccagaggcctgaggggatatcagaagtgtgggtgtgtagggctttagggcacctcacaggagccctgccaggagagaccagaaggcctgaagtcaccgttccatggagtaggggtggtttgcaaccaatgacctgaacctcaccctctcatctgtgcttcctggggttcaacgttgatctggctgagaggaaaaggctcagggtaacccacttttctgtggggcctctctcagctctgccccttagaactaagacagcagcccacctcctcctggcagccaccccaactgggccagccttctttcaaacccttctgaagttaaaccccccaggttcatgggttcattcccggcccctcctcactctggagggagagggcaagggatagagtagtattttcggtttcatgtcccgctctctgaggctcccaggggagtgagcttgagaaccgctgcccgtgcgcgctgccacttactgcctgagcgtaggcgccgtaggccccgaaagggatggccatggggttgaacatgcccatctggccagccatctgctgcattcgccgcatcgtgcgctccttgtcggtgtcggcgaacttgaccaccagactggacgaggctccctgcggccggggcggcgcgtgagacccacctgctccagagcctccgcccgcagctgtcggtgcctctggcctgcgcccaccccgcccgctcctcggggcgctttggaggaggcggcatcggcgctcgcccaggggaatgaggtgtgaaccccaccgcgggcattttccacctgggtaacctcaggccagttccttaacatccctgggcttccgcgtccttgtctgaggcccggaataagggtcatgctttcctgtctcttggggagactggacagccggcggggcgtggcgggtgctggggtctcggcccgccgctgccctcgcccccgccccaaggggccagcactcaccggcatggtctggctgccgtgtagcgcgttgatggcggcctgcgcctcggcgtgggaggagtacttcacaaaggcgcaccctgcgaggacgcgagaggccgagctgggacccagaagcagggccagggaggggccgggaggagagggcgcatcccaggtgaacgcagacgggtgaggcagagattgagaaagagacaccaagaagcccagagacagacggcgatggccccggagactcagaggagccctctggtctccctccgcctcgcccctccctccggggcatccctcccggccccgccccgcgcacccttgctgttgccgtcgggcccgcgcaggatggtgcactcctcgatgttcccaaaggcctcgaaaaggcggcgcacgtcgtcctcggactgttgcttgttgagcatgcccacgaagagttttctatcttctagaacaaaattaggagatgcttacccgggccagggaccgggctgcgcgggagcagggcaaggccggagggggagagcggcagggaaagggaggagccggggaggcggggcgggggctcggagccggcgggggagaggtgcgggggagggggacgggggcggggcttagtcggagcgggaggggcgagggagagaagtaggtggggtaggagcgcacagtcgcgggacaggtgcggagagagctgtggcaggcaggagctggatcgcagcgactcggcctcctcccgcctgcagggcaggctgcaccctgaggagcagagaccctgggctgacccctcactagagcacacgggcagcctgcgttcccctcctccttcgtctcacatgctatcctctacaggctccaaaatgaatcacaactggcgggtctgacttcgggcctttgcagatgctgttcccctgcctggagcgcacttatcacaaggtccagtcctcttcttctaggtctcagtttgagtattgcctcctcacccatgccccttcttatccctcccttactctgtctcaggcccccatccctgtggccggaatgtcaaaggacaatgactactttgtgggtttccgtatagctctcctttcccacccattccctgggatgctcactggggaaagagaccaggcctctctgctgaagcagcagtgcctggagcacaggaggccctccatttagtgatgaggtgaataaagaatgaatgactgcctgtcctgtgccatcccagggcacacctccttggtatgtcacatattttttcttccatctggatgcgccctcctcggtctggctcttcctatttcttcacgctgcaaaattcgaccctggacactttgggggcgtctgttcctgaagatgcctcagcagcccccacacacctgggatgagtatcaggtgctttgttgatcccatgctgtgtgctcagggagacaaagcatgcacgcatggggctgtatccacctgcagcagctggtgaatgactgcagaaggcagccccagcccacatactgctacttcagtgtgactgccactcctctcactgagagtccgggggcgtattccttccccttgactgctctaacaaataaagaatggcagaagtgatgccaggtgacttctgaggttgggtcataaaagagatcagcttccacttgcctctgttttgtggggtggggggttgttagctctgtggaagccagccaccatgctgtgaacccccaattagcccatgcagaagagtccccatggaaaggaactgaggccccagctgacagccaacatcgaccaccagacacgtgaatgaatgagtcctcggataattccagctcccagcctttgaattttccagctgaggcccagacatcctggagcagagacaggccttccatgctgtgccctgtgaattcctgacccatggaatccatgagcaaaataaatggttgttttacaccactcagtttcgggctaaattggtatgcagccataggaactggaacagagtcccaggggtggctgcactcagcaggcactcgctagatgtttgtggatgattacatgattgacacacagccaaagctgcagaaatgcagaccccaaaactgcaaatggccatgtgttcatggtttcctctgagcacatgggcactcagggaccctgtgtccttctgtattcaaggtggttggtaccttctttcccagagaacccccaccttgcccaaattgtcaggagagttcacttagagctgagggtctgtcccaggttctgaagcaaagcagaggaggctttcaggcccctgccctccacaagccacctgcagagtcctcctgccctctgccctgctggtactcctcagtccagacgcactcagcactgggccagttctcaatgatgatgtggtaccaggtcccagctcctcgcataacctgtagggcacagttactggtccctgttaccagctgttcgtcaaaaaacaccagctggccctccaacagggtgggcctcagctaaagctctggaccccagagcccaggccccactacctgcctcaagctgctcttctggctcctttggcttggcaagactttggggcacacccccaccccatctccagggttctgcgtgcagccctcccccacttactccaggctctggggcacaaggagaaggaagagagagagggagggtggaagagaaaagctgaagtgggatgggaggagatagagttcagcgcagaaagggagtgggggagagaaaatggcaggaaacacagacaagagaatcagaggcaaagagctgggagaagagggctggggggaaagatggcagagacagaggaaagactagggagccattatgtttgactcctggaagcagcaacagcaatttactggaagtgaaatgggagcttttccttcttttgtggagtaattaaaactcttctttccaggcacagcccccagtgttctccctacctccccctcaacctttagtgccttttaaaggctcaatcgaattgggtttccagaaagacttagaaatggaaccccgcccctgctaatccctggccctcttgctaaaaattccacttcctcacttggacagaaaaaggaaaggaagggaacgcacctcctctgcccaagcttgatttacatgcggagactgcagctcctcgccttcgcctctcctgacgtctgaatgcattcctttattattgctatgacagctttctgattgcattaaaattcatccacatgtgcctttctatccagccacttccttttttgccggttttgggttttttttgttttttcctaattcctcgttcccctcccctgaaattttcctttactgtgcagttctcagttaagcgcctccttctagaggcctttctaaacatataagctgccaggctccccctcttcctccccatctggatttccccagggaaactatagccacccttacctttctggagggctgcaagataccaaagacacccagcttcagactcacttcctccaggtagtcatggattgaccacaaccaactcaaatgtctgcttctaggatcctcaaatgtgttcagtttgcaccgtcctccagttgggtattgtggcttgtgcgagtgattctaaggcttgtctctcagaccaggggctggagggactttgagtttgcgagtggacttccttgtgggccaggcccactgactccccctcccgctcccctgctccacaactgagttttgggatctatgaaatgggtatgattagatgctcttgtcatggtggtggctagggtcccagcgcctgccaagaggtaattaccatggcgatggcccctacttgggtttctccgtgcaggaggaagaggaaatgcagtgctgttttcccttcattcgccctgccttggtttggcctggaaggtcacccctgctgtgagagggcagaggtcaaagagggtgagaggagaagtcagaggagccacatcttatgatggggaacacacttgaagcaacaggttggactagatcctgaggctgtggctggccagctgagatggacaacatctccctgtctcccacccactctgcccacctcctttctgtccgctttcctgaggcactgtctcaagctgcatcacataaccaacggtaccatttggctggtgtcttgggtctgatgccagtttcgcaagagtcttggagaatgactctgtttccccagcccgtgcccaccctcctcctccatccacacagcccctgactcctggtacaggcagagaaggccctggccactgcccagctgcctaagctgggacccctggtaatggagaggctctggtggtccccatgttctggtgagccctcagccctgagcctgttgcttcccatagtcggggtattggggagctgcccctctgaagacacattcaggcaggtgctgctgggctgggccaaggtgttgaggcaaggagtggcctcagagttagtgaggggatgggctgaagagtgagtgagaggttgctgagaccccctgggggcccagagatgtggtgagcaactggaggctggcattaggagcccagaattctcttgacagagcccagctcaggtcaggggctcagccctgggagttggaaagtgagcacaacaaaatccgctgacctgagctgcggggactgaggcctcacgggttcctcctggtcaaggggcagagcaaggggagcaagcatgttctacagtctctcaacagctgttcactgagtaccttctctgtgccggactctgttccaagcattgcttctacagtggtaaacaagagagacgaagctgctcgttggaactggcatctgggtggagagacaggccatccacaatacacaagtccccaaacaagacaaaggccagcagggctggcacactgtggccccaagaactgctgtccctgcacctggaagaacaaggccacagagtggcagagctgggcaggaccccggataacaccaagggtttcatgcttttccagataaggaagctggggcagagaaggaaccccaggatgcacaggaggttgcccatagctggagcctagactcaacccagcctcatggggtcccttgatttcatgatcacaaagcccttgctgctgccatctgctcttttaaatcgtgtctgtgcctgcaggtgtgagggagcatctggggttctgtggaacaggagtgtgactccccagagggctgggcaacaggacgtaggtgctcatcccagccccgcttggacccagagagggcatcttggctctttgtccccagatgtctaaccaccataggggagtaggcagagtctgtactcaccaccccacctgcgcaggagctggggctgggggaagatgataaaactgtggacaggagaagcttccagttctgtgtcaggtgaagatgcttacagccacctcaggaggggctggacaaaacccctgactttgcatctcccctctggctgccccttcagcaaacattgattgagcactcactgtgtgcctgggaattgttagaacagaggatctgagatgagttttgggagcacttctgggttttctcttttaaggggttgggaagaaagagttgtgcatggctctgagatccctggagagtccagagtctttggtctatgggcccagagcctcttcattggagcccctgatgagagaacaaaggcctgatagatacattcagtaactctgggatgaaggccagaagaggctagaagtgggaggagaaactagctacaccctgatggcttccaggaggaggtgggctggagttatgaagtgcatgggacatatgcagggacaacaagcccacaccagaatttgagcaaaggtggagaggtggagggacgccttcggctgcccttttcacctgctccaagtggtccctgcctgtggcagctttgcaagaaggggacgctgaggaagcttgactttgcttcttcacctgcctcctgactgctttcctttccaccaacgcatacatcacccattcctctgacttcaggactctttttaattttccttaaaccccagtctaactctgagctttggttcacaacctataaaaagcattgggtgacacccggggaagtgacaggtgctaacggaaatacaatggaatctggctgccagaacctcctgcatcctcccatgggtccctccatgagggagacaaaaactcctgagctcactgtattcagggtatcagggaaggatggggctcgggctgaaaggatttgtattttaaaaggaaagcccagggcaccctcagtggaacctcaggattagcacaaacccctaacggggatgtttcagggctgtgccttctctgctgccccaccctagccacgtgggaagcatcttgctggccgggcagggtgagtgggcctctgagtggtgaggagggaggtaacagcactaccacttgactcgccaaatgccagcatcctggcactaatgctcaaattccagtttaattttcacaatttgattcactcattaccatcagcattaaacaatatttcttgcttaaggatagacggttgcaggggcactgtgggcgagtgttcagatggttaatgccttttattaccgcagtagatttttactattctcttccctccagctgctgaaggaaggttgggggctactgagctggggagaatgctggggtcagggaccagggtggggagtacatggctttgaggtctagtggctggtggggtgggcagagaggctgctaggagacctggaggctcaaaggcagcagtttgggggtgcagagaaaatgccagatattcatgatgacagagctggaggcctctttcctgctttggagtctttggtcttggggagtgacagggactgggcaagagcccagagaccagagcaccccatgaatctgctcctcagctgccaggcagagtctggagcccagggtcatcccatgcagtggcccccccagggtgcctcctggatcccagggtcttctactctctctgggcccgcaggcagtgactctgagggtgaaggacatgcccccctctctaactttacctgtggatcagggaggaccttcagtagcaagggacagggagacacacctgactcaacaggagggccaggccaatggtgtcctccagatactaactgaggctgtttgtcaaatcctagttccaccacattttggctgtgcaggctcaggcaaggcatataactccccaggcaggtctggaattaaatgaggtttttagcacgtgcgtggcacagagaaaaggctcaataagtgccagttattgtgaatgttgtaaccattactactgctcacccatgggaaccccagctggcaggagggtgatgcccactcccacccctgggagtgtagagaggaccaccagggacatcaaactgagcaaagttgtgccagcccaggtcagtcagagaagccaacagcattttgagaaccactgagatgctctccagcctccaccaggaggtctacatgggttgtgcaaaaacagacatttcccctaaaggtactgagcatccctacatggcatttccatgaattctcccaatccagatctgtcaagcacccatggttcctaagggacaagcaactcatctgaatctacatctgtgcagttttcaaggttgcctgaccactccaccccaaaacccagaggcttccttttcttcccctttgccagcccttgtagagccacctcactgccccagggggcagcatacagcagcagaactgccttctaagtagggatgcagtggatagggacaggggtctgcactcccatccttggaggctgagaacccagcaattacccctgatcaggtcggcgcagacagtttccagcaccactgtccacactggagtcaagaacctgcagctatgtgaccaggctggccatcctcccaagagccagttccttcacctgagacacagggtcaccacgggccaggtctcaggatggctctgagcctgagccagtggagagctacacactccccttccctccactgcactgtgctagagccagctgggctgggagccgcctctgaggataaaagccttcctgcttgggaagaaggctggaggagacatcaaaccagatcaaaggctgctgggatcaggacgtgtttgggggcctgcaatgggatgcaaatgaagaccctcacctgctcttccccgcccccaaggaggcagtgctggccttgatctgcttggcttcctccggtcctggtgctgtttgatgttggggtggaagaggcaggagactggagtccccgtcacttgcactccttcgccagcgctgccttccagatacttcagggtctgccatccctcctccttctaccctgaggttggagccacccaggcatgacggtcaccttctcggtgctgacacccaccaagcccctgctgtctgctctccacaaaacagcagaggggggcattaaaatccagggcagaccctgtctctcccctgctgaaaccctgtggtggctccccctcactctgagaacaagccaagtctggtaatatcatgtaaggggctacacaggcacacacactccatgccctctgacctctctcctccatgaatgagatgtccatgttcattcattcatgcagcaaggtccaattcctaaatcgccgggcatgtagtagatgctcaataaatacatgttgccatgaataaatgaatccatttgctcaatgagcattgggggtggggctgctataaaactggcatggtgatgggtgcaagggacaaggagctgaccttcaggaatcctcagaaggtaggaaatgagtgttccctggagatgagtaggcactggacatactgcgggaacagagcatggagtgatgagccctgtaggtatgaggggctgagaaagacctaaaaggcctgcgctggaccctgaatgatccatgggcagggtttgcattgtgggagaggcaaggggtgggcactgcgggccagggaacagcacgtgcaaaagcagggagtgtgaaagggtgtgtggtaggaggaagtggcaacatacacacacacacacaccaatacatgcaccacgcatatacccctacatacatagacacacacccatctcacatcccaacacacaaacccaaccactcaacatgcacacacacccaacacacacacaccaacacacaaagacacataccccaacacatacatagacatacacactaacatacacacaccaatatgcacaccagcacccacccctcaacacagatacacatacacacacagatacacacacccatacactccaacacatacacaaatacatatgtgcagatacacaccaacatacacacacagatgcacatacacatacacacagatacaccaacacacacctcaacatacagacataacacacacagacacacaccccaatgcacatacacacacacacaccccttcctcctctcccacccaccctgatctaagcacctccccaaggcaaaaggcctggcccctctcctctgacctctgggagcctggcctgggcctccaaccctgggcccattcttctcgcctgcgcctggcctcacagtgcaccatgccctcccttggctccctctggttcctcatccacggcacccatggctgctcctgtggcccaacacaacgtcacccaggccctacatgacaagagcctgaaggacccaactcccacatcacagaacccctgccgccccagccagcactgctcagcccagtcaacgccacctccctcccccgagcttgagatgccctgcccatggctgcggctctgactcagtcctccaggtggtggttgtaagatcaacaagaagaatcacaatggttctcatttcgcccccagttactatgatccagacactgagagcagcactttacaggtatggcaggtatttgattatttccactgttcagatgaagaaactgaggcacagagaagttaaatatctttcccaagaaatcacacccagtcactggtgaaggcaggactcagccccaggtggtctggaccgagctgagctttgagggtcttccttttccccccaggcagaggagggtaccgcctggagttctcactccctctcttccctctccacccctccatctctgcacagaccactggcaaaatgcccaataaccacattgctttttgagagctagggctttggttgagagccccaaggggtgagtgggtggggcacccatagcctgctgctagctgcaagggagtgggctcatgggattcccattgcctggggtcccagttaggcctcacagtccctccccagtcctgcccatccctctgatcacagcctgcctgtcttgaagtctcctaggtgctcgaggaggtaaagtttttccttttgagtcctctggccttcccctcccttgaatgtgggctgaaaatgtcctctctcgtcgtcacgcaggaagtctgccctgctggcagaatctcctctaactgcactaccccctccatgcctgaagcccgtccttggcccctggggcctgttctgggcagaggtgtggcacctgagaaaggggtttgtaggggtgcctttgaggggcttgcagtatgtttgcagaaccagagccagaacttgggtctgttcattccaccctctggggggccaggaatggctccttcactctcatctcttgcgctctgagaggagatgagctggcctagggaccctgaatcaggagaagctgagccttgggattcagtacaggtgaggggtctggggactgtccccacctgcccccttgctgcctccctctctggccttcggacccttgccctgtgagtttgagtcaggcctttctgcaggagcctgggacaccacagtggctctatgtagaagtcaccttttgctggggtggtggcgcgcagccatctctccaggtaactgattatacatttgatctgctacattatccttaccaggcgcacggcacacgatagacggccctggagttctgtggggacttttcgcagccgaactctgttgtctaatggggtttccgctggcgtctggcacactctcctgcatttcacccatcgcaggataatttataacataatggggcttttttttcctttacatcatgcgggagcataaattatggccagtttgtcctcggctttcaaggagacagacaaagcagggctattccagcatgggcggggggaggtttctgcaggggaggaggaggacagggtggtctacagggcaggaggggcaagaagaggagagaccaaggaatggtgttaaaagcttctcattgacagggcaaagaatctactccaggtggccacaaatgctagggaagaaataaaagactcacttagagctgtttgtctctattaaccatggagcgggggctcgttagctgggcgcagagctgcacagtgataaggctgtgtgtggggcagtggtcgctgcctgcagaccacctggccacagactttccaacattagccacaggctgacccttatggggcctcaaatcctcccagctgtgacccaaatttccacagtcgcacagagagggtgagtgggcatgggcctcctcggtgcctcccgccatcgccagagacacagtgaaaaactcagtgctgggggcggccgtgcaaaccccctgcccctctgacccacagcccgtttttaatattgacagtggggcttggctttctgtggatgaacagcaatagagaagctgcctaccagcccactggccatcttcccggggaggtgcaaggcctcagcatcctccttacttgtctaacccgggaggagtcacactggaatgaagagagactgatctggcggctgcagccaccacgcccattccccacacctgaacactgtgccgagaacctctagcgaccctgggttgggagtgggtcttcagaggccacctggcccagcctcctccattaccacccagttgcaggaatgatgcttcctgatcacctgcagaaggcctgctggcctccccgcgagacccaggagggagcccagaagaacgttgtcttatgtgcctccagagcccaagtcctgccctgtagcaccagcggctgcccctgcgccctcaggacagcccttcagggatgaacaacaggtgtcttagatctcatgggacagaggtccttagccctggctgccatggaaatcacctggaggcttcgacaagccaggtgactcgggctggcccccgagatacggatttgagggattggttgggagcccagatgtcagtatttctggttttggttatttaaagcttctcaggtgataccaacatgcaggcagggcagggaagggatgcaatgggattggtcttctccaggctgctcgtctctcctcaggcactgcgtccctggccctccacctgcctgctgggatagagcccttcagactgcaaaattctgggccctgttggtgcagggatggcagcacccaccttctatgccctgacacatgcctgagcctggccatccttcccattgctcaggagtcaccctgtaaagctgttgaactaatttcgggaggcggggtgaggggacctctctaggtcagcacgcggcttagcccctgagggctttgcaagccccctcttcttcctcctctctcttcccctgtgccccttccccctccatccaccagccagccctgctctgagtggggaatcccaggcccctgtttctcaggcctctgggttcctttctattccactttgttccagccaccatggccctcctggattccctgctgcccaccccaaggaactcagagggcccatgcttaagtacacggtgtattaactcatgactgataatggactgcagatagacatagagatggatggatggtagacatgattaatagatgctagatatccagattaaatgttagatgatagatagatacacagatgaaagaaaaatgattgcagaaagcagatagatttatgatggatgacacataaatagcaataggtaaatgtggatggatgggtggccaggatgcttctgaggacttcaggtaatgaggtctaaatgcaaaggtcagaaaatcagtcacaaccacccacacctgctggggtgctgactctcaaaataacaaggaatgctcttctgttcaagacctatcttgaaccagcttctctttcaacacaggtccctgcatctctacatttgccaatgggtttgcagttaacataggtttcaatagggctggtttactgtggacacctgaagattctctttgacgttttcctgaacctactggcaggctgaaatgacctctcaagcctccactgcacctaatgaggtcctcccttcctgcgcggagggatgtctcccttataggtgcctgctcctaagggagcactgctcctaagccctgtggtgagacggcaggtgttggcccacatggtttatgcagagctccatgcattcattctcttggtcaaagaccatgccctcagagaggatgatggcagcacacaccatgggccaagcacagctcagaccactttaaccttatgaagtgggcaccactgttccccattctacagatgaggaaacgaaggcacagaaaggcttggcaaccaacttgctggggatccccaagctaattcacagcagagccagactttgaaccaggtggcccagctctccagctctcatctaacacgcagaaggcatccccctgccctgctcaccagaggatggtcatgaggccctgctgagctcaggagggcaggcggctctgggcacctggaagggctgcaccatctgcaagccttgattctttctaatgactaatgagattgtgagggggagagtttgctttcctgagagaaccaaccattttgaagggtggcaacatattatctgttggtatgtgactggcattgctaacaacagaggagcctgttctctgttgttagagaatagagaacagaaatattgcctcttaagggtggcaatatttggttaccgtgaaattcctttaacagagtggcacaagagaattttctgtctcagaaacctgcacgccagctctggggctgccctggacctctcctgctattcaccactcagtccggcagtcagtattcaacaaactatgcacaagggactgtgtcaggagatgcaggaagtagacttgatccttcaagaaaagtgcttccaaattagggcctgagcggcccagctgtggagggcagaccatgatgggggatcgtggggtgagaagggatgggggctggcagagggggcagtacacggtggagcagcaggaagagtttgccatgctgcagtgtcctcatggatgaggccacaggatactgaggtcaggctgcactgcctctctagggaagggtggggagaaggatggaaacttggggatgggagctcagaggacagaatgcaaagagcttcgttactcagctcaagtgctccagaattgtattttgaaaatcaagacatagtcctcccacccacaagtctccaggggattctggggatgacaagcactgtggggctgctctgccaggagcaggtggtctgggagtgaaggaagcaggtgaaggcccccgcttgctagctagtacgccccagctcgtccccccacctcccttcccccacagccagactctgctatcagggacactgtcagctgccctttggatgtcctgacagtgggctctgtgccagctggccatctccacacatcctgtccacttctcaccaccatgttccagtagaatatgatgagagtactgtttgatagatgagttaactgaggctcagacaagctaagaaactggtggaagctcccccaggcagtaagtggcgcaggtgaggctggaccgggtatctctggtggctgcaccgccttctctgttgtgtgacatggagtattacacagccctggagtttcatcttttgggttctaagcctgcagactgggcattgccctcttcagggaagtttttgaaatgtggtggctctggtcacctccacatgactgattttgccagaaagtgtcctttgtgatcacaaggatctgataagcttttaggcctcgagtgcctgagaatggaagagaagtggaggaggcagcatggaggggcatggctgggagagggcttgatgctggggaattaagggcagcctggtgtctgggaggtgagtgatgatggtgctgagctggggaggccaaagaaggtggctgggctggagggaatgttccctgccagccccaactctccttccctgtccatgcacagcagctggatggcccagggcagtggagccccctgaacatgggtcccaggcacctcaagctttgtctgctggctgcatcagaaagcttcatccacaggtatatgtgactatttttcaaatgcatctagatgatgttgtgattttaaaaatacaaatccatttaaaagcgttgctgaattcaaggtggagttttgtcattttgcattctctcaaacaatggatactcaaagtaaaacatctgtcaaggggggcactgatgaatttttgatgttaaaaatggctccttaaccttgagaagtctggaaatgctgatccaagaagggcagcgggagcttgagcaggagaaagtgccgcagctgaattccaggcctagcgcatctcacccacaagagcgcacattacctatctagagggaaggattgtggtgggagggaagcagggaccaccccagacttatagttagtaaactcacctcaaactacaacctgagcccagtttctgccctcctctgggcctaatcttcaaatttatcctttgattcgactaagatagtaataaccaagggagtgaaaatgattgcctggaggcctagactgagagctgtgtcttcccctcttctcctcctcctgtctgtctttctccatcagccttttcagcctcctctacaacatgatccatgacaattttcagttttatttttatttttattttttgagatggagttttgcttgctcttgttgtccaggctgaatacaatggcatgatcttggctcaccgcaacctccgcctcccgggttcaagcaattctcctgcctcagcctcttgagtagctgggattacaggcatgtgccacgatgcctggctaattttgtatttttagtagagatggggtttctccatgttggtcaggctggtttcgaactcctgacctcaggtgatccgcctgcctcggcctcccaaagtgctgggattacaggcatgagccaccgtgcctggcaattttcagttatgaacatgagtcggcatttctggtgatgtgaggctgggagctgtgcatcttcccactgctgggaggccctagtgtgatccctgcctcacaacacaagctcaggaagcactgtgagaatgaatagtgactgtaacccatgtactcaagaggagggttcatgtcagaaagctcaaggttgggcaggaagcctggacctgcatatgcatctctttctaccccgcaccctggtgtggtcagggtctgccttcagcgaagataaaatgtgaaactcaccttggatttaacggctggaggcttgcatttggtttcccaccagccctgtgattggggcaggggttcagcctagtctctctcctcagctacagaatgggatgatcaggactgccgcagggctgacctgagggcctgggcatgaggccacgggtttttagaatccttttgatttgtagaatcctttcagcagctgctcacagggtggttccctctactcatcaacctcctctgtcccaccacattggggacatccctcttaagtctccagggtccacagctgtcccttagaacatctgagtttggccaactctactatacccataatcagattcagcctctttctaaccctcgtggaactgaccagttccttgtcccaacacagcaaggcctgtgttccctgctgtggtctggatgtgtgtgccctcccaaaattcacacgctgaaattctaaaccccaaggtgatggtattaagaggaggagcttttgtgggggtgattggatcatcaggacagagccctggtgaatgagattagcacccttataaaaaaaaaaaagaggcctgagggagtttgttcacctcttttccaccacgtgcaattacagcaagatgttctcaccagatatggaatctgctggcatcttaatcttggacattctggcctccagaactgtgagaaatcgatttattgttgataagctacctggtttatggtatttttgttatagcagcccaaatggactacgacactcccactgaacaccttgtcagttccaggcactaatggtggatactgcatcaattagtttttcattccagtacaggtacattttaacaagactgtccaaagccttaatccaaagaagtggaggattgtggtgacatttgggggcaagtgggggcagatgtgagatggctcagggcaaggagaccttcctggggcccttaaatcgccccacagaagtgcccactcattcagccttgggaagactgtgggtggagggggtgtcccaggagaacttcctcctgcctggcttttctccctgacaccggaagtgacgcgggcaggccaggtacttagcacagtccctggaatggaggaaacttgctgcggttattagtggtgcctaatgatatttgcatagattaacagactttaatgcaatcagaatgccacaatcccgagaaaataatgaagaaatccattacaaagtcataaagtaactaagtcaatacagtaataacttgatcctgtgttagtaataatttcatctcccgctgcaaggtgattttgcaatgtgcaccgtttctggacacttttataaatttcacctttgtttgatataattaattaacaaaataaaaaatacactgctggtattttatacagtaaattagtcattagtctaaactggcaggctgtaataaaacttattatgatggatgtgctgggatttttaacttctcttcaagtggcctgtaaccctctcataggcaaaactcagggctgtctgatggcagtggttcaggtggatagaaggaccagcaggaccccacaaaagggggttggggtgagagaggggtggaagcctagatgtgggcccactgggcttgtggaaaccccttggggacctgcatcctcagcccaggctccttcgggcacagtcttagtttcccagggctgccataccaaaatgccacaaactgggtggcttagagcaacacggatctattctctcacggttctggaggctgaaagtcagaaatcaaggtttggacagggccacattatctctaaagtctccagtggggttctttccttgccccttcctagcttctggtgtttcccagcaattcttggctttctttagttgtagctgcgtcactccagtctctgattctatccctacgtggtgctctctctgtatgttctgtgtctgtgtctaaatttctttcctcttctaaggatgccaatcatattggatttagggccagtatgaatccagtatgacctcattttaacttgattacatttgcaaataccctatttccaaataaggccatgttcacaggttctgggtggatgcaaatttggggagaagactacttaacccactccagacactgtaggctgtgagatcactgtccttattcctgcaggaaggaagggacaggccaagtcatgctgaggtgcaatgacttccaggtgagtcgcctagcagggactggctattagaaatctatggtatcctaagaggttatctgatgggctagaggggactgtgaagtcttcgaaatggtcagcaccaattcatgtctatggctatttctcctggagaatagattcagagcttccatcagattctcaaaagagcctggcaccccaaagtgtgcttatctctttaccacatcaaacatatgggggtcagggaggaagggatcactaaaaccaaccaactagcaaaccaaatagccaaccacctgacccaccaaccacctgactgacaacttccagataaacaatttcacaaagtttccagaaatcttccaataccccccatcccaaaaggagtgcagattctggggctttagaagggaagctgttgaatatctgtacttccactgtggcacgggtgagggtgggggcaggctgggggactcccacggttctgtgtctagaatgagaactttgctggggagatgtctttggattttgaatgtattacccttcatctcatcctccggaccagtttcaggtcatcagcacattttaaaatcagcttctatgtctcccacctttgagaagttcttgataaaaatgttcaacaggagggtaccagagacaagggccatggccatagatgtcaccaggaacctccctttctgtccagccagctctgagttactctgggcaactttgccatctgccccgagtaggtgacaagatgccagcttaggccctgctcctatgcatgggtcacccacttaccaacacagacacccagcttccttgctctggctcaccctggtgaaccactgtggttcctaagtcaccatcattttcccccaaatgctctcaagccatcagtttgatgaatttattctagaacttagccaaaattgtcttcaagatcgccagcctgctaatttttagaatccagcctcttcaccttttaaaaacttggacctttgtccatttcttgtctccacagtgtctcaagtgacctgcagcagctctgtcagtggaatacccgtttcatttgtccacctgaggccatggctcaatttgctctgtcctagaaatacaacctaatttatggggccagatttgatctccttgacttgtttggatattaattctctttttatgacatttatcaacatttcccatcctgaagaccagcctctttgctagagaagatggaagaaatgcagaaggtaaacttctctgttttccgctagtttatagtctgcttttcaagtagatagaattgatgggtctcgggcaggaagacatgcaatgtgttgtttgtctttctggaccatgtaggtgaactgcaattctctttctgtctctggggctctgacttgaaagcagggaggaggcatttccccaagctgtgcctcaccttcctccaggagggggcgccctgaaagcaccagtccctgggcctctcctggatgctggcttggcttgtcccagatccctgcccctgcccgaatgaatgaggagggctgcaaacgtccccttttcctcttattgttttcctcaaagatgtcatccagtggtcactggtgccaaaggcctggctgatgcctgagaagcccaggtttggcagatcttgaatccagattgggatggtgtggctaacaagctgaaaggattatgggtggcaggtagataaggggtttgtttttgaaatgagacataaattatccttgaattcagcagcagtagatctgtgtcaagtggtgatgagtctaaacatactggcccaggtcagagaccactccatgccaagagggctcagagcatgctggaggcagggaggcatctgggaagaagacaacttctatttttggaactcttgcaatgcaccagtcatcagaaataatattattgttattgctactttacagaggaggaaatggaggcacataaagaggttaagaagttcacctacaatcaaacagttagtaatgggtagaatatgatctgtacttcacatccccattcgaaatcctggtgtgggcatggggagtctccaacatacagcatccgaagggaggcacccaggtgaaacctagagttgatctttccagcattggcggcgagaggaagaggaactgcactgggggtcagggcctgggttcatcagcaggctgtgtgacctgtgcccaatggtgtcacttgtgtgggtcttcgctttctcttgcagatgtggtagtgtgagattggtgcatcccactcagctggagaggagctctgtgaggagctctgaagtcctcggcatgtgcagagaccctcagccctgtccccttcctctctgctatctccttcctttctccttgtcccccacaaaaatcctcattccagtgacttggcacacccataggcatccctgcctcttggcttggccattcaactatctttttggcttgtttgtttcatattttattttgagacagggtctggccctgtcacccaggctggagtgcagtggcactttcatggcttactgcagcctctgccttccaggctcaagccatcctcccacctcagcttcctaagactacaggtgttacagaaagactatagcctcctgagaccacagctggcattacaggtgcatgccaccatgcctgcctaatttttgtacttgttgtagaaacagggttttgccatgttgccccggctgaccttgacctcttgggctcaagcaatccacctggcttggcctaccaaagcactgggattacaggtgtgagccactgcgcctggccggtttgtttttaatgtgttgggtgaccatataatttattgcccaaaccaggaccctcaggaccctcattggtttgaaagggaacactattaataattagtccaggacaacatgcaactccggccttgtcctggcaccttgggacttgtgggcatcctggtttggctctgttgcccttcccctgctgatggcagtcctccccaatcttgaaacgctaacagccctgcctgttgctccagcccacaccagtgccctaactgtgggccccattgacggtccagcatcattctatgtcctcctgtttcctaaaggaagctgttgaactgtcagtctcggctaggtggcagttctggggctggtaagttagcagtgaacaggaggacgccccttcacccccaagggccaaaccagggagcagaatctccactccagccttttcccacccagaggccttaactgggccaggtgaggaacacaccagactgaggccagactgggcaagcagctcaggcctacaaccagaaatcaactagggagatgttgacagcgagcagggagagaagaggggagcaggggagattgaaggccaggctaggcatcagggggtgcagtgaactgggaggccagtggaaaggccactggaaggggtggaatgggtataaggtttctttccctccctttcctctccctggcccatcacagttataagcagatcacctgctatcagtgaaatgtagcaggtggcgagggcaccgggaggccactacctgccatctgccaaggggccttgaatcccaccattagagcctcatctctttggggtaagcattgctgtcttcagaattctcttttaaaatgcaagatcactttatccaagcagtcagcctctcacgctttcacatgcattcctcatcagagcacggtcctcccgcagcagctggctcagagcccttgacaaggtgcgggaccactgtccccaggaggaaaggtcctcctaggcagcaaactctcctagcgttatctgggatatgtcatcctttctaggtctattttttgtttaagataaaatttacaaacagtgacatgcgtacatcctaaggatataatgtaataagttttgacaaatgtggacacccacacccctgtgaagatatagagcatttccgtttccccagaagttccctcatgaccctttccaggcagggtccccaaaggcaggttcctcaaaggcacccagtgctctgaacgtctttcaccactttttggttctgcctgttctaaaacttcgtacattaatctagttgtctgtgcctggcttctttcgctcgttgtaatctctgtgagattcatcggtggggcctgggccatgcaaaggcccagatgccagaccctgtgccctctggccgtcaagttagcaggctgccttctccaggcattcagcagagactgttgggtgtttgggaagcaggagtcccttggccagaggcgcagccaccaatggtgcacagttctactattaactgtcctccttctgtggtctgcactgggctcaagggatctgctggcctcagctccacgaatgggctaaggattaaaggtgtctgctagagttagggtgagaggcccaggaggctggggtctcaacccagggctgcaggaaggagtgatggctgagccttggggcccaggaatatcttgagagtgtgtataaaatggcccaaggatctgcagatgctggttcttccaaggagaaggatcatagcttttctcaccatgacagccaccactctggtcccagccatgtccacctctcctgtgtgactgcagtgacctcctgactgtcctctgtgtccacacagcagtcagaatgagacagtgcatgtcactgctctactcaaggcccctggtggatccctgttccactctgaataaaatccagttttggctgggtgcggtggctcacacctgtaatcccagcactttgggaggccgaggtgggtggatcacttggggtcaggagtttgagaccagcctgggcaacatggcgaaacatggcaaaaccccatctctactaaaaatacaaaaattagctgagtgtggtggcacacacctcccagctactccggaggctgaggcaggagaatcgcttaaacctgggaggcagatgttgccgtgaactgagattgcgccattgcactccagcctgggcgacggagtgagactctatctcaaaaaaaaaaaaaaaaaatccagtcttaacaacagtctacaagatctgataggatcctccccttctctcctgctactctcccctcactcccagttccgctccagccaagcggggcccggtcctgaccaggaacactgctaacatgctgtagtcatggctttcctttggggttctagcatactttctgctctcttccctagcttgtaagtcccagtagggcagcggtcacctagcacttagcatagggcctggcaggtggctgtgcttgctaaccttctgtggaacaattcaatggaagaatgaaatgctgcttcagttccccaaagggatctgtggcccagaaaggctaagagcaagtaggcaggatccgagcaggcaatgctgggccaggcagagagggctcctggggtgaactccctcccaggcccccactcagtcaccgcaccatgggggagggcactaaacagaggcagaccagaagaggcactgcagcaggggccagcctcagaccatgagctaggctgggggctccagaaggcaagacatttgtgtctcttaagcctacttgttgcaaatattttcttgatttatatgttgtttatatgttgtttcactggcccatcccttagaagtgaggggaggaaaaagggatggccagggcccagtcacctctgggcagggatgctcctgggagtgagggtcccaggggcctggtatgggggccgggcagaactgggacaggatgggagccttgggccacgtggaaccctcccactcagaatgtcgggctcacagggacaagggatccaggccagaggccccaggaggaaggtgtgagaaccaggagaggctggcactgcgggctcggctgtctcctgcggcgtgagcactgctgcctctctcttccctgtgtgtcacttaatgtttgcagttaagtatttacagatatgttcccatggcaaccaaagcctcaaagttactctcacaattctgttttctcaaatgtgtttctctggctgattgcacagggttttctggaagccagccaggctgagtgagtcacattccctgccctgtgctcccatgctttttcccttccccctccagggtccagccagccagcatggtccccacccccatctctcccacgctgaacagagctcccgggcccatactccccagcttggtcaggttgtcccagggcctggagtgcagagccacaacccccaccatctagaccctccagctctctggatcattgcaagcttccccttccaggaatccttctccagcttccctggcccatgaggcagacctgaaactgcccccaccccatgcttcttgaggttccttaaaggtggggtcttccgccttcacttctgaccctggacacctggcctgggggccccattcacataatccctgctgttgtaggtgttcactgaacacaccacactcccttgtgcctgcttgttgcatgtgatctgatcccatgctccagcacttttttttttttttgatacggagtcttgctctgttggccaggctggagtgcagtggcatggtctcagctcactgcaacctccacctcccaggctcaagcgattctcctgcctcagcctcctgagtagctgggattacaggcacctgccaccgcacttggctaatttttgtatttttattagacacagggtttcaccacattggccaggctggtctcgaacttctgacctcaggtgatcctcccgcctcggcctcccaaagtgctgggattacaggtgtgagccactgctcctggcctccagcactttcttatggcactgccctgtgggtccctgtcctgcgcattcagccattcatttcctgagctcctgctctgggcagggcactgtgcaaattgccaagatacagagaggaacaaagagtccctgtctgcacggagctcatctctaagtgacaagggatggataatgaataagaaacaatcagggtagtgatatatgccatgaataaaataaaacaaggaagcagatggaggagctggggctgcattaggttggaagtcaggacaggtcgtgggtagagggacacagaagctgagacagggtgagcagcagtggcatctgggggtgcctggcagagggagcagctagtgcaaaggcccagagcaggtaagtttgaggaacagccatgaggccaggcgcctggagcaagagattcaggcaggcactaaggcagcagggctgggagtggtaaaaggcttggacttccatgtaagtgaggatgaccaaagcatctgattgggccactgtgtagagaatgcagtggtggggcaggagacacaggaggaggcaggcagatagaaaggaagggggcagttgtccaggagacagaggatactccaagtgggcagggatggaggagagttcagatgagcaaaactgtggcaccaaagcagccaagcttggtggagtgtatgtgggaggtgagggctggagaggatgtcagtgtgactgcctggggtcccagtgggtcctattgcctcagctagactgagaggccactgcaggtgctgccacagccccctgtccctgcctgattccttgtttctatcctccgccagactggacactaaaagacggcagagatgggggcatgggtccctgtgatggctcagtgtccagcccagcatacccggcaaagatggctgcctccccgcagccccagaagtagccctcccccagcaggacagctaccacaaagtcccagggacaggtgtctccctccatctgattgcactgggggctgcctcgtgccaggcatggggctggaccatgtgtttcctcccagctcagccctgctccaggttgggggttctcctcctctgggctgcccttcctcaggttccatgagcctggagatgcagaggtgctcagagctggagcccaggctgaaccaccgctctctgttggaccctgctgggagcgtgaaggctctgaaggtacctcctttaaagagccggaaggcctcactcggctaatggctcattgagtggctgttttgctaccataagtgatttcagtcactagcccttaattgatcttatccacacaatacatatgacacagtgtgggaaagttcctgtccacggagcaggtaggtctctggcatggcatgccatgccacccacctttccccttccccctgctctactggcctcaccaccactgtccagacctcccgcctgctctgggcaggtgtcattcaaaactggggaacatcgaaaaactcaggccatccaaagggttgaacagcatgcaaaccactttggttggctttggaatatatgttgactttcacagcgaacaagttggatgcttatgggaatttgggccgtattaataaaactcccaagaatacactggaagaactgtccagaatgcccaccggccaccccttcctggcacaggtggatggagttacctgtccaatgccccacctcatcagagcccctcccctccccttctcctatcctctcctgctgctggagttggctaagccccagtgtgtggggagaatagaattcctgtctgtatccacacaacttgagcccctaaagtgcttcctttaagtggccagaaggcctcacactgcctctgtcccctgatcattggggcaggcacccctcttattggatgggaattatcgcccccaacatcagccagcaacatggcccctgggagccccttctgatgagggcacaagctgcacaaagggaagacagacatgaggacacctatgagggaggatgcacatcagtgaccacatctgaagacgctgggatgacactggaaaacacagctttcctggaggtggggaggtggagggagggaaatggatgggtgaggattgacgcctccccaggcttccaggtgggaggcacagcagagtttcctgggtgctgcaggggatggagaatgtgagcctgaagctttattagggtgtgtggtgtgttctgaaagtcagactttctcccagaccagcagggtgagctttcaggaggcagagggtggtgcggggagcaggcaggctggctggttgcaacagctccctccaacagcattgcttcctagtccactttttccttcagagtggtcaggagcagccaggagcacaggctgtctgagggacagggtgcacagctaggccaggcacagaggaggggtgggagaggagagtgggaagggggctccatctcctgcagaaactgggggcccctggagggtgcttagcaagcagggaactgaacactgtaggaggggagaaagaatgaagcaaagatggtggaagagaggagaaggaacaggcatgaaagtaccattgttctcagcacttcctttggctcatttgaaccccctgggtgaaggcttgctctggctagaggcatgacagaagtgcagcagagccgtggcccctgggaggcccagagcccacaggcattgagggctaaggggatttggctctgttccctcctcccacctacccaggccccctgcaaagcttgctctgcaacagggagagattaatatttgaaatcctggcagaggtctccttcctccactccccacccttcacttccccacaaaaaggaaaacagtcgttgaaattgaaaaatggtgctcagtgaagggtttaaagacattttgaatttaaagtatattttaaaggtcattttcagcagtaattatgttataatggtggggctcttagcaaaaggcagtccccacagtaatatcagaccaaatgagaatcggggagagcttggatctgcagtcctcagaactaggctgggcagaggtgaggcgggtggggagaaaaaaagggaggcaacacgtcctcctttttagagccacgtcttggtcactgctggctctccaggtccccaggaacagggaactacacagttaaatttggccctggcatggaagcgtcctccaaaatccctcccaggctagccttgtgggctttgggggattcacaggaccctctgatgaggcaggtctggcctcctgtctgacgggacattctacctcctccccaccccaccccatgtcctttccttctgtttccagacactgtcattctgtggccctcctggccgtaggcatcccaacccctcctggagacaagtccctgggggtagcatcataggagaaggcttccctgggccccagccccatggtaagtgccagacacctgcctaggcctgtacccactactgcctgacccagggccaatgttgcaaggagccttcatttggcatttcttgcccatcagttgtgctctgaatttttttgaacagactgggacatgaatacactggctatttgtctgaacctcaccattttctaccctatatccccaacttacaaacccacgcaacctgggctcacattctccctcagtgaaggcatccattctttgccggaagcatcgcccacacagatgcttcacacaggcttgtggaagcaatgcacggaaaacacatgcatgagcacctgctattaatcagaatcaaaatattctagaagggctggctatgggtgagacactgaccaggccccagggggttccatgagacagcaggcttccagactatggggagaagacactgcagagggcagtgaggaagggatatagctgggattgtaggaacagccaaaaggcccatggtggggcagtgggtggaggtaacctgggagggcttcatgcaggaggtgtgtggggcataaattcaaggacaaaccgaccaaagaatgaagaacaaagagccaagaataaagaaatgagcttcagcttctttcaagccttggccactgccagtccacctggggagaggcaggttcatttttaggcttctgctgggtcccccagctcagcagagctctggaggtggggtgaggagaacagaaccaggcctggggacagcactgtgtggtgtctccctgccctcagccgccctgccactatgggcttcctttcgggggaagtagaagcggagcacccaactaagcagtgctgccccttccatcagccctggggtggctctccgcaaaagggaggctgtccacaaagaaaattgagggtccagaagggagggggagcaggtgggggctggaagtcccaaacaggagccagcagtggtcccaattggcctccacaggaatagggttcccaggtgggggagcatggctcagggatggtggtggcaaagggactggtggggatgtggaccagagccttggaggtggccacagcgtggaggggaacaggaggaggagaaggggtgaaatataaaaatatctgggagaagtgcaacactgggctacagtgttattaaactaaagcatcttataaaactcgagccattaataacaggctgccgccacgttggggtaatttattcaaattgcgggtccgggatggaggagcagatgtttcagagctgctggtgtcactgaatgagtttcagaggaggaggggtggtgccagcattcgcgggggcttggggcgccgcgcaccctcctttgtccctcttagcaaatgtctccgctccacattccacaacacggtggagactcacccagtctgctggaagggaggaggaaggatcagactgtggacagctaatttaggtcagcaagtgccgggatagaaaactagggtgtaggacaggcaggcaggttcctctgtctagagtgtaacagctcccatcccggcctctgctggcctctgtactctgctatcccctccagttgaaatgctgactcctacacaaagtcacccatggttttcccagacccacagtggggtggtgctgggagtcagatggcctgagaatcagatgggcctgggctccttcctaagtgcaccacccaccagctggtaaccccagcaagtgagctcatgggcctcagtgtcctcatctatacaatggagcagtgatacctaagtcatggtctgggggaaaaagaaacacattgacccacaggaaggccttggcccactccagggggctactaaggtaggttggtgtctggtattgaacctgatggccctcactgatggtcaacttagtgctttgattctacatctgtccctctcttctaattgtttccttggttttaccctcagctccaaccaactgtaaacaccctgaggccgagaatcacgttggcctgggaattggagggggtatggggcacccactctgcttacagctgagttggcgcactggacagaaggacaggacccagtgggcttctgccctgatggggaagaggcatcaaagctcgcacaggccttcccttagactcagcgcagccccctgggttttgagcaaacctgggtcctggtggggggccagggcctcagggttgggatgtggccacagtttctaggacagagactgtcaggcagtccctgaggactgactgtcaagccctggggcagagggacttctgtagatggaagccctcctgccagatctgccttccggcaaagcagaggcgccctgtgaagtcgtcttggactctgtcactcccctcctggcgtgtctaatgctagggccgggggcactgctctgctgatgtcttcatgcctgtgagtgactccacctggctcgtgggtgacttgctgtggatgtgttgatttttacttcttacctctgccccaggacaggggacacagaatgggcccaacaaattcagagtgctttgactcccaacttcaaatgtgtgaaaggagattttctcctcctttgtctgcttggcagagccgggtggctgctcactgagtggctttgggtgtggcctagcccagtcaagaggtgctctgtgctgcccctgcctgggggtcccagccttgtgcttggactctggccaatcactgacaagagcccttcagtggccccgatggcatgccgtggtgagcggtgagcggataaaaggaaatgtcccagttggaggccgacacatttcttcccatggggcccagcgctgatggtgccaccaaaacgtaaggagaggagaatggggagggccctctgtccccaacacggctctgacctgaaatgacaccgctacagtgatactccgtcagggcgagattgccgaagcaaattctgcacttgacaggacagcatcgcttcatttctcaaatgctggggcccagggagaggggagaggagccacgtttgccacctctgtggtctggccactttaggcatgggggcaggtgggagtgctgcttgtcagaaggcttgggtgagacagagggggccaccaagtcttccccaggagcggtgagggaaggtaggtggctgtgatggcagaagggggcttgtactccactcccagcctggttgtcccccagggtgctccccgcccacctggctgtgagggtcagtggcagccacctgccctgtgcctctgctctgggcaaattggaccttctcatagctcaaggttcatttcaaatgaaggagaaatcacagccccacagtcgtggggcaatcagcacgctctgtgatgaatggagcctgtgtcactcagcgaaaatgaatatttctttgtgataatggccagatggtagcaactctccgatccaaattaaaacatgcatgataaatgccaggaaaacagaggaagacaaaaccccaacctggagtgaattctctctataaatcttccccccgtcccccgctcccccaccaccacagcggccctgctaatagccattaaattattaagatgtgccacaaggagaatgccaatgtcagtggcatcggccccactgcccaccccatgcctgtgggctggggggtggggagacgacagagggggctgcttttagaccagcagagagcctgaaggtagggaggacgtctgcgtagagatgggcctcatggtacaagcacaaggaggctgtggggcctggtggccagccaggttctgtggaaggccagacctggctgccctcaaggagggcacagtctctgtgagagacaggagttaactgacataaaggctcagacagagggcagggaaagggtttggagctgggaaggccagtagggacccgctggacaaagcattgcagtggggtgtaccgtgacgaaagctctgaccaacaacatggagctgggcaggtgggaagggtcagagatgactttctgaggatagacatgcgcctgaaagtatgcatgttcctggaggtctggaggcagcaggtcctgggcagggcagggatggctttggggcatacatttcatagcaatgacgggctcctgaacctacagtctaattctcctgccccctgcccaacccctcatgactggaggctgcattggtctctggatggtccctctaattccctttccagtgatccctgcaggtgacctgtcttcctaagtccagcttctgtcaatcaccaactccctctctggtatcgaagactccccatcatcttctggaactgcctccccaccccaaactcctttgcctggcgttccctgaaacctcttctctggccaactggtttcctccttttgccctgggcaggctttaagccatggcttctgcattcctggtctcagcagcttttcagcctggaaccccctgcagcagacactgtcctccagagacccttccctgactgctccagcgggcacaggccacccctctgccatgcaggatgtgctgtctcctctactcattggatgctcagcatgctgccggctgatctccctgcccccagactgtaagcttctctagggcccagagcacagaggaggcttgaagacatctcctccatgtatctgtctgtcatcgcccatcagctctccaggagcaaggactgtccctcgaagtttaaagttatttgcaactggccatttatgtgcaggcctcaagcctcctaagacatctaggccagtcacccagtgccaggatttggtgtctaggacgttgggatcatggattttccccgataagggtcccggctgacctctagatttctgcaaagccttcgtcattgccaggccctagacagacaaggccatgcctggtcaggttggttctcaacctgggcatacatggagtttctctacctgctcctcccagctgaccctccacactcagatagcacagacaggctcatcctgctgctggctgggcttgcacctgggcaggttcagcttcagaccctctttgaggacacctggctgggctttgacctgggcaggtccagcctcagaccctctctgaggacccctactacccacccatgccaaagggtatgtggggtgggggcatgagaagctaaagaacccagcctgaagactgaggcaggacccatcctcatccttaatggatctgatggttggtattgatgctggaagaacttcctctaggtgtcagcaccccagcacagatccgagggaggacagcaaggcttggaagactgcccagaaagacagaggtgcaaaggctgattactagccatgtgttgttgaggaagtcacctctcttctccaagctctcattttcccctccataaaatgggagtgatcctcacccaattgtgcagggctgctgtaaggctcaaggcactcttattggaggctctggggtgacttaatgagaggattgaggccccactggctctatttaccttccttccagagccctagcagctgctgctacaggcagtaattggtccccatgtgccttgtcctgggctgggtagggaaaaagcagatcccgctaacagaggcagggcatgaccaggaagactggatgggagaacgaactagagaaacaagactccaggatgggcctggtaagcttgggctagaggatgagaagagacgacgtcccccaaatgcagatactatgcgcgtgtgcacgagcagaggtatgcgcgccctgggatgtcagcagcaatgagattcatggtttaccaaatctgggtctttctattccagaaagtggaccctgctcttcagccaaaccatttcttcattactttgaaatatctaggatgccacatttttgccttgcttgtctctgttttcatgcctttgcctgtgacacagtccagatttgtcctctcagtagacttgtcattcccataatcaccacccccaggaagccttccttatcccattccattctggcaattcacatgctcaatatagctgtggccccaggcagtatgatttctatttgcacttgtcaatcaaaccttgccagaggtcatcacccctgccacctcctctcttttcccatggactggactataaaaataaaatgacaacttcaacagctgtcatcaaggaagattccatagttcaccaactatgtttctcccgtggcagctccgaaggggtgtcaccatccactttgcaataggatgatgcagctctcggggcaagacagcactgtgagaaggggatggaactgggaccagagggcttggcgggcagtgaagcccagccaggtccctgctccccgcctgctctcgctccctccctctatccagttcagcaggcctagacgactgcttccaaaactccatttctatcacataactcccctgcccaaaagctttagatggcttccctttacctaaatgtatccatttaaagcagcttctggaaatcattgctcccctgcaaagtaggccccccattctggcctcttggggtcttccaagcctgccttagttcagattattttcccactcgggaagctctgctctttgagctcttccgtgctcagatcctcctcccctctgaaggccaggcaggtgctaccacttctgatctctctggttcatgccgtctcatccctcttcctgtccctccccccaatcacctgtccctgcacaccctgccattcccgtgttttatcaggctgttcccagtgcggtgtgccggggccagggggacgctggatacatcacgttcagggctcactcagtgctcacttggtacaccagggctcactctgtgctgtgtggaggacaccacctagccctgggaggattgcctgggaactttctctcctctcgcccatctcccaaggaagtgggggtctctctcctccacgctcacatagtggccgggccagacggtagtgacatgggagtggcgatgggatgggacacgagaaggccgtggtgccttctctctgtcattcctattcctgggcacacaggcatgaggcagcttttaaatatcatccagaagcccatttgctatgattaatatcccatttcccctgaaacaatcctttgctaaattagccggggccacagggaatttgtcgaggagctgcgagtctcaacttaactttccaaatggattaaaaaaacttcaaaaacaaaatgcagatcaatcaacaccccctcccacagctgaaaatctaaagtccatttaaattcagcaggtttgcagttaattatattttcgcacctatggcaggagttacagacgtatttataatgtgtgcctgctccgctggtgcctctgcagggccctctctgggaactcttccccaccagccacttccttccccaaccacgaagaccaattcttcacgcagctgctgtttgggtccagttgtgtaaatagaagaggcttcctagctttttaaaacttatttttacaaaggggcttaagaaagaaaggagataaagattctcttaaattttaagtcagaagggctggcctggtggctcacacctgtaatcccagcactttgggaggctgaggcgggtggatcacgaggtcacgagttcgagatcagcctggccaagatggtaaaaccccgtctctactaaaaatacaaaaaattagctgggcatggtggcacgcgcctataatcccagctactcagaaggctgaggcaggagaattgcttgaacccgggaggcggaggttgcagtgagccaggatcatgccactgcactccagcctgggcgacagaaccagactccgtctcaaaaaaaaaaaaaaaaaattaagtcagaaggaacagggatcgtccgggcgcggtggcttatgcctataatcccagcactttgggaggccgaggcaggaggatcatgaggtcaggagatcgagaccatcctggctaacatggtgaaaccccatctctactaaaaatacaaaaaattagccaggcatggtggcgggcgcctgtagtcccagctactcgggaggctgaggcaggagaatggcatgaacctgggaggtggaacttgcagtgagcccatatcacgccactgcactccagcctgggctacagagcgagattccgtctcaaaaaaaaaaaaaaaaaaaagaaaaaaaaaaaaagaaggaacagggatcattgagaataaaaccccagggcagagaaatgctgcactgtgatctagggaacctaatggctggaaatgctaaagcaaaaatggcagggaatgtggtcagataggtgacagaacttcctgaccatcaaggaagtcataccctgggcgagcagctgggcctggccagttgctaatctggccagttgctaatccttcagcccttcctaaactttcaaaccacctgcacagcgcctgtctgagcaccacggactgcccggccatgctgtcttatgtctcacacaaacctcttgtgttgtaatgtcatttcttaaacatcagcccccaataaacctgggattcaagtatacaaaagatctgtcaggacatacgcttggcactggttggtgttcaagggaaaacatgcccacctatagcttgagaaattcaggtaggggatagggcaggacaggcaggcaaagcaggagcccaaggcatggagaggagactgaaagaggctgtggagttgttttacttcttaaaaatgttttaaaatggaagctgggtgagagacagactcatagggtaggggtagggtagacacaagggctcctgcccaccccccaggcctaggaggtgctgtgtcctggccaactgggcagataactattccccaatccaaactccccttggtttcctgtgatgcctccccaggacccttggccaaggacatggctgtggaagggctatggtgatgagctgtggacgtccaggtctggagcagggtctggaacaaggatatgtagcccccaaaacacatatacaggggccacaagtggagcccacacacagcccacctttcggaggcctctgtgggacagaaaagtgtggaagcaggtgggcaggtgagggtgggggtctccggctctgaggggcagactccttctccttcagtcactggacgccttctctctcagactgcaccctccatgctggggtggggttagctctgctcatcccagggtctcccaggcagagtccaaaccaacaccaaatcaatgggtaaggacatgctggacctgggaggaggctcttagtttcttatggactcagcgtaatttcagattaattttcaacgtgctgtggtcccagccctctggatgtttctctgcagcccctcctgcctgggccgagggcttcctcagcagagctctgagaagtttctgtgcacccagatgcttttgtccagtgagtcactcgctgactcctaagattggaaaattgacacttctgtatattgaatttttgtaaagcggggccagcttgcacatccagttcatctgcacactcgctaaactgccttcctagtgtgggagagaatagctagaagattctggaagggagaaacccagtaccaaaagtcagcagttgtggctaggggtctccccagccatgccccagagcctgtcccaccgcagccactggacgctgcccccacccaggcccgcactccacagctggtggggcccttgaagcccttgcagacaacacattgtctgtgtctgtttagaaataaaataatgctcggaggagtaatgaggaatttaataggattttaaaagccgcaggaaccgatagggctacagatggtggaggggccaggaggatgcaatcggccacgggtttatggtggggaacgtggcctcagggagggcctgggagcccagtcactcacattgtatccaacctcattagctggcccagcgggactccgctgccacatcagtgctggcatggtgaggggggatgccctgaagaccctgtgaagtatgctgggagcacctaaaggctgcaggaacgctggacacttggccagcagctgtctcagggatgcctcccaggctgtcacacctgaccccaaccctctcatgccttcctcaccctgcccaggtaccaccagagacaggctgagagacagggacacagagacacaagatgcaggagtgcagggagggaagaaacactggcttccggccacacggtggctcacgcctataatcccagcactttgggaatctgaggcaggtggatcatttgaggttaggagttcaagaccagcctggccaacatggtgaaactctgtatctactaaaaatacacacacacaaaaatttgctgggcatggtggcgggcacctgtaatcccagctactctgggggctgcggcaggaggatcgcttaaacctgggaggtggaggttgcagtgagcctagatagcaccactgcgctccagcctgggtgacagagtgagactgtctcaaaagaaagaaagacagacagaaaaagaaagaaagaaaaggaaagaaagatacacgggcatgggctcccaggtccagatacagaggccaagggaggaagatgagcaattctgcaggacttggggagggtaggggaacataaaagatgttcattcaccctctgaaacgtcccaggggttctgcagatagcttactgccaccaccctgccagggcccccttcctggctggtgccccaggctgctcccctttccgtcctccagcctcccctgcagcttgtggggggaacaacaggacattctcacggccagctcagccctgcctgccttcacctgcctaccttgcttctcctgggttcagttctcagctgcctgctttgctgatctgccctgggcctgatagaagcccctgaaggaaaataggctcccattgaccagggagagactcgggagcctctcagtggtgggacctccagcccgggcctcacttgccacagccagaagtgtgttgtcggccggtggtttcatctggcagcttctctatgcaatcgggcccgattctgctgtgcaggtggccacctgtgtgtgtctgtgtgtcgtgtgcttttcagttctgggttcctggagagggtggcagaccctggaaggtggttttctttcttgctgtgttccctctggatggactccccagtgctagacccgctccctcccaagcctgtgccttgggagacaagagttgggcctgttatccccaaggccctgctgaacagagcttccacttggttctcatgtggccactgggtagaaagagacaaagggagcccacaggacagacagagacagaggcagacacaggcccagaaacacagacaagatgagcacgggcaggtggcagcccctagggagtcctcaagtcccctctttcccaggactctcctcccaactcttcatggtttctaacttctccccagccagccaccttgctggcttttctgtcatttcgtgttgatgagataaaacctggtggtcccagtctgtgccccaccccagccagcatcatcaaagaccgtccccacctcctagcagtaaccatcacactggggtttagccaaagtgggccttgtctgctctgtgtctggaggaccccagggtgctgtcacacagttttcccatggagcaccccccagtgtgccatgcactcatggtcactgacagaggcactgcagacacacgcccagttccgcacatgcacccagggaggcgggaaagaaacgtcctccccagggacacaggggagatagcacgcatctgcagtctgctatacctgacccaggtatcagccactcgtcccctccttcagggcccctgtctggctgctgatcctcttcggcccactaagcggggtgggcacacacatccgttcagcccaggagctttccaagcaagctggctgcctgaggccatggtagtcagagcctctaccccctcatctctgactccctgaaaggaggccctacaacctggctgcaggaggtaccttggtgggggaactgtcctgtcacctggactgagacctgggaggagaggaagtggtcagggctgcagggcagcttcctagggacacccatggagactccatttagaagctgagcatgagccagcatgagcaagaccccagcatggggtcttggggtggggtgtgtctgcctgccaggaggcataggacactgcagcgcatgccctagggaggtatcatcacctctgagggggccagctgccatgttcagggcaggcagggaggggcctgctctccacctggctctgtccccagccagcatcactggttaatgaattggtttgcttatattggggataaatctgagtttaaatacaacttgctccagtgtgcttttggggataactggatcccccatgcagacagatgactcctggggaggctcttctttggccttccttccctacttaattggaaccccagatcctggtggtggtagcaggggccctctctcttctcttcctgcccagggacattccagccctctctctgtctgtgatctcttgcccaggatcagtgctcctgcttccaatggtgacaagcccaaccccttggccttgtgttcgaggccccattttaactttgtgtcctcactgtatcccagctctccacctcttgatctaattcctaattcccacctcctccaggaagcccttcctgcttgctccaggccacagtgaattctctcttctctgacccactcctaccctggtctttcatgtctcatgagtaggtctgggagctccttgtccagcctagccctgcctccctcacctggaaccctgctcctctcacttcagccaccttgagaatgggcctaaaggtgagacaaatgtctgtggtgtcttcccactgcctctaggccacccagagtccgagaagccctcctgggagtgagaggaatataggtaatctgggttctggtggctgacaggtaggagttggaattttggttctgccactttctgtctgtgtgccctggaacaagttatctagcctctctgtgccttggtttgtgcctttaagtggggccaagaacatccataccttgaggttgctgtataaattaaacatatttccggccgggcgcggtggcttatgcctataatcccagcactttgggaggccaaggcagaaggatcacctgaggtcaggagttcaagaccagcctggccaacatggtaaaaccccatctctactaataatacaaaaattagctaggcgtggtggcgcacacttgtaatcccagctactccggaggctgaggcaggagaatcacttgaacccgggaggcggaggttgcagtgagccaagatcgtgctatcgcactccagcctgggcaacaaaagcaaagtttcatttcatctcaaaaacaaaacaaaaccatatttccataaaatccctaacactcagtcagtgttctgtaaataacagctttgtggataatgactcctgagacccccaggtaaggagatggaggcccagagaaggtggtgtgcctcagctggagctcattccggataagaaccttccacaaaaacaagaactgcatcctatactcttcctggactcttcctggtgcttgctccagccaagcactcagccagctccacttccctctgtacttgtatctccactccaacccctccagaggcaaggctggcactgccctcacaccaaagaaaaaagagctccctgaactgctcctgataggacagtggcctgtcagcctcagccagcaatccatgtgtgtcagagacaggagccctgaaagttacaaagcctctcctgtgcacacagacctgccaactctccgccatgcccatccctagacacccccacacctcatgtgtgtgggtggatgtgaccgggaatgtgtctagaggcctgagatgggggatgagaaggtggaaccacgatatggccatgcagtgggctgcagcctgctctgtgctgggcgaggtggagagaagccttcctcctgccccctggccaaaggccccgcatgttccccaaatcctaagcagataagacatctttctgtgctgcttatgagcattcaagtgtgcctggagggcagctgtggatgggtgtcctgtgtcctctgggtttcggggactcgtaacctggttcactgctgagccagggctggggctgaccctccccctccttctgcggccactgctggcttctgctcccctcgcaccactgtgccccagtcttccctcacccactgtcttcaaggcctcgctccccctcctcctcctgccgcttatcccctcacctctctacttttctcacctccttcccttctctcctctcctcctgcccgctgccgtcatgccacctcctccacccctctcccattccttctctccattcccctctcctgttgcctatttctttaatcttctaaaatgttcacttctccccccttccccttctccccagaagtatttaatggctattaaattattttaaactaactttcttttaaaaaaaaaaccacacagcttggtgatagtgctgactcagggccatctcactgtttaatattgaatatgcaattaatagaaagatgtttaggtttggctttccctacacctccccccccccccactttctactgcaagaagaataaaagagctgagtaatctggtttggggcgagtgttagccacaggagatatatgggagaaagccgatgaggttagcatcttggagtcagagagctattgcctctgaggcaagttcagggagagaaaggtttgagttagagcccagcacggccttgctgggcagaggggattccagacatccctctccagtgctggagaaaatggcctggactctgacctgcctgctccacaccagatggcacctccttatggccctcagaggcctgggtcggtggcccttgttcatgccatccccccttctcaagctgtgggatctcccaccttcaagaccagaagggccacctcccctgaggcctctggctgcccccgcctgggggatctcctctccggaactgctgctggcacctactatcccagctttcctgcccatccatgacagcttccgtgtgtcactgcctcctggccgggccgtgtgaactgggggctgcaggtgagtcactgtgtgcctgggtgacggtctccaggagacacccctcgcactgctgtgggcctcatgtgccctggacgaggctgagtgaggatggcactcctctcactgccaaggaagggacaggagcaggcagcacaaaccacatgggcttcgctcacgtgggcccctcacgcctgaagcatctctaaccctcaaccaactggaccttgactaccggggtccttaggaccagagcactccattggtgtgaggaggtgcgtctatgccctggggcatgggatcccttcaggcagccccaagacaccagcccaagccctagtgggtaggatctgaggtccgggttgggagggggcctgagtcctagaggccttgtgcctaagtcagtgccctgctggggctggagggcagaggcctgactgaggggatgaaggagtgttctgagcaggcacaggccccaaggatgaacagatcaccagcggccacaccacagcaccctccaggacaactggctctccaaatttgcaagtagctttcacctgctcgacattttgcccttgatttcccggtaaactttctgagaaatgagggggagagaaattcctcggttcctggctgatctaaagagcagggagaaacccagagcactgggcctgggcctgggcctgggccaggggagggtggtgaacagggacacttgggccagagcccagggtgtggcagggttggcagaagccaagagctcctggctgggaggtggagggcagctgcgactggctgtcccatcttactacctgggccctcatgctggacaccccagccctggcggggggaagggtaggctggggccaccttggaggctgtacctaatgtcaccttctcagggcaacaaaaggccccaactccagctgggcgcggtggctcacgcctgtaatcccagcactttgggaggccgaggcgggcagatcacaaggtccggagattgagaccatcctggctaacacagtgaaaccccatctctactaaaaatacaaaaattagctgggtgtggcggcatgcgcctgtagtcccagctgctgaggaggctgaggcaggagaatggcgtgaacccgggaggcggagcttgcagtgagccgagatcacaccactgcactccagcctgggcgacagagtgagactccatctcaaaaaaaaaaaaaaaaaaaaaggccccaactccttacgctccccttggtggcctcatgggtgttctcaatttttctaaaccctttccgggctgctcctgtctctggcggaagagcagccaaggtctctcccatagtgggaggaggctggaggtaggaagccaccgcccgtctgtcctctgggagtgtctcacttctgtatggctgtttggctcactgcctggctgtgcctctgtgggaacttgggctgggggccctagatggtggagaggacagagtctctactcgggggtccttcacctgctcggagcctccgtttggcccccttctccggggaagtggctgagagctcagttcagagcaacgtctgggcagggcccagaggggatgaggctcagtgtgagtgccggggactagtgatcaagaaggacaatgcccttctcccaaggaggtgggccaggaagagggcacctggcaggggcctgcacattcttctaccctatggggctggggagtctgtttctctcccacaggtgaggtgtgatgggctctgtatcactggggcagtttgttgcaggaggagctggtgcccgggtaggggaggcctgatcttggatgctggatgtattttctttgccatgtccttgcctttcattttcttttaatgtcagagtatgtttgaatctcatctaggggagcctagggccagggctgtgcctagggtgggccctggttaaccctgtggctgggatggggggggcagtacagacacacaggcactgtgccaagaggatgctgtcacttggtgacggagctgcccctggctggccgtctgcctaacccttccagcggtgagcctcaaggtgctgcattcccttactcaggctctccacggccagtctccagtgggctccacattctaggacaagcgtctgtggagtgaggctgtgtccttcccctctgtccctttccagacacctgtctgactgcctgcctctatctccaggatctctgcctcagtgctggccttgagtgcccacactcccatggaccactcagatttgcctccttggcctgaatcctcctacagcacagctgtgaccacttcttgtctcccttctaactgcacaagccccatcacggtggggttttccttgtccacatcgaggtgggcacacccttttgggtgttttaatggaggggagaagaatatcctgggacatggcacttgtttactcagagacgcataaaccgcaccgtctggaagaccccaaacaccccccttccctcctgtctctctccacaccagtcacccagagctccaaagctctgtccccaaccctcagccacgagatccccagaggggcaagaggaggaggcggggagtcgctgcatcgccttgctgcgtcgggaaaaggagggaggagtgagagggggagggggaggggcagagacaagtgggccctcacgtgaagggggctggcgcaggcagctactacctcctcggctctcgctgtccgcaggcttcacctggatcggccggttcatctgcaacagagcagagggggacagcattatagcaggcctgcgggtgaggggacagacacccagcactcaggtgcacaggtgaatgcgagtatacagactgcacccacagacacgcgctcccacaacatgctgctgcaagcacacacaccttcaccaaagtgctgcccgtctcccctcgacggcacggccccatggccccattctttcaggggggtgtctctggacaggagactttgagatgcctcctcctcctactccgagcagcagctcctactagcctttgatatcagaatctgaggttgacagaaatgctggcctgtccctctgtgtcacacaggcctttgtgtcaccaaagcacacccttggctcagccctggttcactcaaacatctgcctttatggaaatgagctggtcactggctgcagatggaccccacccaggccagggcatccagcttgatcccagcccgtaccagctcgcagaagtggcctatgggtcaggcgtggccaaggctctgggccgtccagctccatggttaaagcagagctcagggctggggctccatattgcagccagggctgttctctcagggagtgcgtggagtgggcacagctacttgtcccctgtggtgtctgggtgccaggaggacaggagagcaatgcctgactcccctagccgccggcctctctcttccctctcggggatctgtgtcaatggcccattcagggcactaggggtctctggactccaagcatcccgggcttggctgcctggcttcagggctcaccgggaggcaccagggtgggctctacagcccggaggtctcagagtggtttaagcaacaaacgtgaggaggatcacgccagcggattctgacctgatgtcttcaccagtgcttctgcccttacgcacctccctgagcccttcttgcatctgcatttctctcacaaactcagactcagagaggtagtggggcaggtacaaacacccccattttagagatggagaggctgaggccaagaggcattcaggtgcttcccaaggccaccacgtggcaggacatggctgggaagtggggcctgtggggtgatttctgcatgtctgtcctgcgctttgagaccttccgttgccaattccctcccgtacagcggctggaccagccagtcacaagcttcctcctaccttctgctctaggactcgaagtgagttttggctgcgtcaggacaactgggtgggggagtatgggtgcctgtgactcagcaaggtgagcacaaggccagtggaagggcagagccgtggccgggaaggacagagatgggaggcaggacgcagccgacaaggaaggaggcacaggtagccagaggcagcaggggaggatgccagggccagcccaccgagaggggcgagggtgtcattgttcaccaccaggtccccacttgacatcccttatggagttgaggggaagcaagatactttgttcccaagccctggcagcagagaactctgccatgttacagcaaattccaatcacagggagaagaaggaggaacgtaatgaagttcctgggttccctgtgaacgagctcctttccagtctttgagggaaagatccagaaggccgcccaggcatctggctatgggagaggggctccaggagggagccaggttgctcctggttccctgtccagtactgtttgggactcagcatctcaccctttcctaggctgccatgtcctcctggaatgccccgccctcctagccttcccttccctgaaacctgtagcattcttctcccccaaacaggtcttaaggactgacctggacccagttccagccctgatgctctcttggacagatttctacagcttttctgcttatgtaattttacaattctctgaggtagggattattatatccatcttttcaatgagaagaacaaagctctgaggagcggcagagctgggattcagccaggatgagtaggcacatgagtgctaccaacacaacggcctttagctttgtcatattttatctcagttgacctcagctgctccaggaggagaggaccaaggaggaagtaagtgggaaaagtacccattccataaagggagattgaggccaggttctttgggccagcaaatcaagcatcttttctgcctgacccccaccccacaaaatctggccccaccacctcttgtaccactcccaccacacatcctggcaccttcctcccccaagtccattccctgggccttcaagctccctgctgtccctcccagcctcctcctcttgacagtctattcattctttgagcctagtccacttagcttctgtatggactgaagtgtgtcccgccaaaattcatacagtgaagccctaacccccattgtgactgtatttggaaatggtacctttaaggaggtacttaaggttgaatggagttataagagtagggccctcatcccatatgattgatgtcctcacaagaagaggaagagacaccagggatgtgcacacagagagaaaaccataggaggacacagcgagaaggccgccatcttcaagccaggaagagagccctcaccagaaaccaatcctgcccacaccttgatcttgggcttccagcctccggagctgtgagaaatacatttccgttgtttaagccacctggtctgtggtactttgctatgacagctctagccaacgaataagccccctagttcatgaagcctggttggtaccccattgggaagggtactacaaggagctccctgttttccattaaaaaggtacactcaaggctggaaattgacttgcaagtggaggtggtgcttaagtgacccaggcctccccaaggatccataacacccctgagaacaggaacagctgctatactgatcgcattgctagatcatcacaacttctcctgtgatgtatgcaaatagattatctctaacttcagtcaaggaaatggagtctcagataggttaagaagttagcctgaggtcacaaaggttgtaaatggtgatatcaagatgaacccaggactcctgacatctgcctactcatttaagagatgctgggaacaggtggaatgggcttgggatggtccaggaaagttccaagcagaggccaggagtgtgggggaaagagaggagagcagggagccagatggggaattcaggcttcccctgcaaggctgggaggaaggcctggctgagaaggggcaggcacaggggtgtgaaccagaatctgttgggctttgtcgctctgtcccaacgggggagtgaggccattcctgaggcaggagactccattcctagggccagagcatgctaggcagaccccacatccctaggggcctcatcctgtgtgggaggaaggctgggaccactggaggagactcctttcctggcaccttgtttctgtgttttacagccagtcttctctagtcgggcctgagagcagctggggtgagtcctgcggattcgcctggccaggatagagctatttctgaaatgacgggtcccattttccatggtaaattaaactgggcaaatgaaatctccctgtgtctggaggcttccaccctagatgccaccccagttgcaggcagccagcccactgtccttggcatctgggcacctgtgatgctttggcctaacatccctgctgcaggagccctcccaaccagacgggccctggatggtgcaggcagacctcctccatggcgtgctgttgggctcacccctcacacacaggcccctctgcttccctccagttttactgtgggctttctgacagcagggacatggagtctcatccagcctcccagctgccttcagccatgggctaggcacctatggggtgctctaaacagattggtaaaggagaacggaattggttcccatgcagccatggctcctggggtcattttccatgtgccattataatctgatggtggtcagcatccagacagcctttgaggggcttgtcagagaggtgccgggctagatggtgagataatatacggccctgtgctttcttaattctcagcagaaataaagtgtcagtcttggtcgggaagatttctcagctggagcaggctctgtacaggtggccctggcctgaagagaaaccttcctccctcccctggtccttggccagcctcactcagccctgactctgccctgaagagggaggaggatggagcacatctgtcctgggagaggaggccgggccaggctgcagagatcgggagagaacaaggcagagcatgacgacagagcgaggggagaggtgaagagaatgccggagagggcgagggcaagggagagcagaggggtcaggggaagagccaggagaggagggaagagccaggagtgagatcaggaggaagaccagaaggccagttgccatctccttgcccttcttgtaactttgccccctgggaccctggccatggcctcaggacccctttggtgcttttcctgcccccgtctctgctcctctgtcagctactcctctccaccagtgcgctgtcctccccggagggccctgtggcttgtggctgctgggaatctgggctggggtgcaggagccttccttgctgattctctttcagagatgtcctcagtgtccccatggaggccctgtggccttcagttggtgtcttcctccaggtgcctgaaggggatttggtgagccaggcctgccttccctgggtcaggaacagctacctgcagcttccctggaggctcctggggtcagtcctccggggacatcacaaacccttgtggactgtgtttctacttccagccgggcgcccctcttagggagcgagtgggcctggcccagatctggagctgtctctgctcccacctgcggcagggggtgggcaggtggatggcccctttcctcttccgctcaggctctgcctcccttccccctccccatccctctgccactttttgcatcaacacatatccatgcattaaacaagacattccattaatttcttcatcatcataacttaagctgggacataccctttaaatattcattcagctatgaaaactgggcattaaaattttaataatgtcaagctcatttgaaccagcctccttggggacgattatgatacaattagaataaatacgatgattgagctggtcgaaaggcttcacctgtccagtgtggctccctctggaaggggaggcctgtggcttgtgggcagacagacagaaagacaggccaagctgctctttcctgactccctcccaacctcgccgcttcccctgcctcctcttgcatctggttctggttctgtgctgccaagtctactcccaccagcctctgcaggtctctgctgcctcctttcccgaggaccagggtgcaaggggcccctccctgtctgagaaggtggctctgattcaccccaccagttcctactactcctttcctggtcctggtatgacctgggctagctcactgggctggtgagcgacattttcctgcctatacacgtctcttctcccctaccttactaggactccccgaggctggaatgagcaccctgccagagcagggccagcctgtgtgtggggtgtggagcccaactgcattctgccaccaaaggaggggaatgtcttcacctggcttccccttcagcagcaaccactgtcctaagggttggcctggaggtttgggatggggctgagcctcccttgtccttcactgcctgatgcctgcttaaagccaaagctgaaaaagccaggggggagcggggaggcaagggggggtccactcctgcactcatcctgcctcactctccctcgggacagctgtcactgcccatgggatcatgggccctcctcagagctggcctcttgtccacctctgtgccctctgcttcacgctgggccccagcagggccccctcacccagtgctgtctctgaaataatggagttgactttctccccacctggaaagcttccctgtcactcctcattgcacccaaaccctcctattcccccaaagtctaggtttgaagctcacctcctacagggaggcttcctgattgtcacacatgaacctgcactactcctttctctctctcatgcgtgtgtgcatgtgtgtgacagagagaaagagagagggagggagagagagaaaagaagatggagatggagagagacttacttcacaaacaagagtggagatcagggcccctactcatggatccccagaggcagcctcaggactgtgcttcttccctggagtacgtgtgtgcaactgattagtgctatgtgacatcacagacatcctaaaagaattcactgtggcagaagcagggggattcgcattgaacgagatcatgaaagaaatctgcaagagcaggttctcagcaaaggtcagcctgcactggaaggtggggactgatgccccgcagggagctggggagagggaggataggcgctggcagccgaggtgactggcccatgggatggccagaatgctctccagagtgactattcaaacctcagagctgagggtccttctggttccttttgggacgtgttggagcctgaagatacctggctccctgctcagcagaagggctcacctcgccaagctttggaggaatacccctggagacacagattcatatcttccccaaacagacataatttgcagccttcaccaggaaggcagctcttacctccccattcctgtgtggtttctgaggaggggcagtccttgcccacctacttgtggacgcgcttgtgtggacttggccctgctcgtcatctatcctggtgctttaggacaacaccagttcctatccacccagataactcaggttttatgctctgccctccaaccccaccccagcacacacgatggtcatggaaacagtgaatcagcagacccgcacgctagagctcactgtgccctaatcccaccagcatcactgctctgagaaaacagacataatttgcaggaccccttgttccaagcgccaaaataaaaagtgtcattaaagtactaaaatataaagcctttccttcttggtcttgctcactctctcaatttgtcgtggtattttttttatttgctatttgatgtcatttcaagtaaagaaaactataaattttaaattattagcacagactttacagttcatctttattttgtgcaatgccagttttaaatgcaaatatcagggcatttacctcctatgcagagtcatcaaaatttcacagtttgtattttgtggcttatgcctggagggtgccttcagctggaaacgcaagccaaactcaggaagcctacaagagaggtcccccaggcaggagaagtttccaagggatttctgcctcagacacaggggccctcacaggcccctggagtcccacctgcaaccttgggcctgaggactgccggggtcccttctcattggccatggactgatgtgtcaagccccagctgagggtaggctctgagaagtcgagccagacatcacctcttcccatgggctctcagtcctaacccacagtggacaggaaactttcaagggtattgtaaactctgtgcctgggacgtgctaggtatctatgcaatagactcatctttgctgagtcatggcctcttttggctggccagatgtggcacagcacggccagcctgggctaccacagggtgaacgtgaccaaccctgatccccttaacctgtgtctaggccactgctggctggtacagcaatgattgcaggtgggactctggacatgggtggacctggcaggtagagagaggctgaactatgcatgagcagagactccaagccccatggacttcatttgcaaagcacacattcaaagataaagtgttaagaatttcaagatggagactgcagagcacgaaacccaagagtaggactcttctgagtgtggggccctgtgtggccacatggggtggcctgcccatgacgctgacctgggggtgcctttctgggtccccatcttcatctgccccaccagacatcaggcgttttgtggatcatcaggtgttttaagcattgcccaggtctgtgcattagtgctatctccagaaagatcatcagtccattttttaaagataagctttgtgcaattttgaggggatagaccaagaattttcagccatagggataaaagcctggtgatgcaaccaactcgataaggacagagaactcaccagtgagcttgtggggatcaaaggtgggtttactctccagagaccccgccctccaccagaaatttgtcttcccggcgcttagcaaattgtaattaacaaattaattaatgatgaaattatttgtttaaagccccaggaggacagggtctgaatcacaggccctgttgaattccaggggctgtgcttagtagtcttggagtcgctgtgggaggaaagaatgaacccttgcctgagggcttctgcagtgccctagtgagactggatcccaggggaaccgcagaagcggcacacattatttctagcttgttgtaaatatattaatgctttaattacctccttaataaatcgcatatggtgcgttccatagagaggggttagagattcaagaaatctcatctgttgtcagcataaaattctgactccaggacaccctcagcagtgatttcagagacacctgacagatatatggatttgtttgtctgtttgtctccaccctgaggagttcccgatgcccacgcagggcccagcatggccccaatgcacagtaggtggtcaggaggtactgaccaaatgatgactgaatcctccatcacaccctgtcatgaccctcgttccctcctgcctcatctgtgcccttgcagcaagagtgcccagaggccagaattgggtcaccaccggacagtcttgtttccagcccagagagaaaggccctttaatcctccctcctccagcaaagtggcgcgttgcacctttggattaggaagggtttattgaagtggtggcgatcatcatttagagagacagccagtgagcaccgaccagacagaagaaccggaggttattgttaaaatatgcaaatccagagcctattaaaatgcaaaccctccagataagattttttaataaatttggtctctgctcccactccccactctgaggaggccatctgatgcttgttgggtcaggacacataccggcacgtaggccctgtcagctcttcacccctctccattcagacttccagcgctgcgctgcctgggcggggctggctgtcccttcttcccccaacgccctgtcccttgaacaaagcacttgaggttgtgtcagggtaatctgcagacatgtctcaccatctccccatactggctgcattccatttttcacctctcctctcatagctgtgtctgcaattgaagtcacaagcctttgcctcctcctccagcaagccttctgtgattgggtccacccagttacactcaccgcctttccagtcatcgcctctggactcactttctgtcaaaagtagccctcaaggggatgaggggaaggtcgctgagaagctgcacaggctccgagtatgataatgatatggcggggattcaggctggacttggacatgctggctttgagtcagggtggaaggaaccaggcgtgtgggttggtgctgtgtgcctggctgggggtgtgcactcgggtctcagaggcatgagcgaactgcagtgagagagggttttcaagtccttcccatgctccagaccttctgttgacctcatgacagggctcacatccttcagtccttcctgaaacctgatgaatcaggtgagcaaattcatggggtgggcagggtgtggatggggtgggggtgggaataaccaccaaagacctggaggagagtggagggaagggccagtggggtgtgaaagggtgtgcggcaagtcgccgagggtgggaggacaggcaggcaggtggaggtggggaggatctggtgtggccgcagaggatctggtgtggccatggagggcctgagcttgtagagtgggcagcgggagcccctgttagtttgcagacagcattgcacactaggactgcatttggaaagagcaaggaggcagctgcacgtgcaggaggtgcaggaagtcagaggtgactggacagaggtgcccaagacaccaagcaaacgtttgttcagttccagaatgaccagcagaaccttggcaccaggtgccttccccacctgtgggaagacaggagcctaaagcttgtacataggaggtgcttgatgaattggcccaaatttccccaggttgccttttattcttggttgtagaatgacccctcactccagtccaagcctagccttgtccaccgtccacttgcaaagagtctgcaggatgtggggtgggacgcagtggtctcggtccaggtggcaccctttgcagcccacgtagcctcactggtccagccccctacaaatatgcccgggcagttgctatgcaacaggcagctctgctcagcagtgtccagaaagaagcagtgagcggccctgacatagcctgctggtgggctggcgggggctgcctgctcctccttctctctgctctccccactctctcccatccctctccgagcctccaccctctcctatctctctacaaaatgccttcccctcacctaaggggcagggctgggttggcacaaacaaaagaggtgcccctcacagtggtcaaagatccctccagaggcccagcctcaagcacactgctggtttcccagggggaaggagggagcccctccctgctaggggtttggagccatatttatgggtagaagcttccagcgcgtggcaggtaaggtggaaggacacgatgaaaatcaccaagatggaactggtggacccgtgaccatgctgctgctgggctgacgtgcccccacctctcagccagagctccctgaggccctcactgccaagggcagagggctctttgtctccaagccccacgtccatcttgctgctcctgtgaacacgccagggctgcactggcaagggtgggaggatccttgtggtcttaattaagatctgctgccgtggcaaccaagctaattagccggcatggtcggctgggtcgctaaccctcttcagggtgggggagtgagggtgtgcaattttttaaataacagtagtggatagataattctgatgaaacaggccctgatttagttgtgaggcctggatttcggtcttagctctgccatatacttgctcatacaaggcggggctgttaacttaacctctgagaggcatatccacgtatcccctcatggggtgtggaggggattaaacatgatcgctcaggccaagctctgaacatcgtgcctggcacctagtaagagcccaggaaacaagcgacagctaccctctccctcctccccctccactccctcctctcccccctctccctcttccccctcctctcccttcttcccctctttcccctcttcctatttctcctcctcctctcacatcttccctgcctttcttagtatttccatcacttttgaggaatacctaacatttgacttttccctttccactccggaatacccaggctcttttggactctgctgaactgaagatgttggactctgtggggaagagctgagaatggggtagggaggccacgcctcatggagaggcaagatgcaccctgaactcaggttctcatggctccattctgcccgtgctgcctctcctccaccctgccccagctctgccctctctgcttggtctaccagcactgaagctgttgttgtgatgggccacaaactccatccatccatccatccatccatccatccatccgtgcatccatccatccctccatccatgcatccatccatccatccatccatccatgcatccatccatccatccagtgtttactgagcacctctgtgtgccaggccctgttctatagaattggatggcacagcaacatgagtgtctcttccctgagggagccaccacccagtctccagaagggccttgctgggagggcaccgggtccatccttcctgggagctggctgtgcactgttgcttgattccctgaatgcccagccatgcagtcctgcacttggcctcccactctcctgaaagtgcgttctttacctctgatgtgtggctcttgggtatttgctcacatacgtatagtgttggagttaggctccctcctgcatggggcgtcgtaatccaggatggccagttctagtgattagaaaggaggcatttctagccccaactcatctcccatgcattttccctcatccactctgcctggtaccagcgccccactgggcaactcaagcccatcttccagaggctgcccccagtgctgggccactatgtagccctgaggtttcagtgtctttcttctaaactcccaggcctcccttcaccactgggtttctgggcctgtcaccctgacagctcacaaccatctaggagccctcggatgtggggtcctgggcctggcgaggggatctctccagctgtgactggcccttcccagcccacagtgggaccactgccttaggagatttagagcacactggctgggtgggagtgagaagggggtggcattgtggccaccggcggctggacggagacccttgtctgtgttatccagggcccagtctcccttccccctccaagccctcccctgtgtaactgttccctccactccccccggactgtggactctgtttctaagctgagcctctccacggccaggagaggtgtcctggttccaccctcaccctgccctgacccgggggggacagctcctttctctctcctgtggctcccgggcctcaatcttaggcctggagagagcaggaaagagtccccaggcatgttaaaagaaaaaacaaagcccacaccaagtaaatgacaaatcgagaggaaattgctcttaatccctacgccacagcctgatgatgccggccaagcacaaacctgagtcatcctagaaatggcaccgacatttgctttttagaatttgttttgtctctgggctttagatttaatcactccctcgctccctccctccctccctccctctgctcccccctctctccctctgccccttgctctcccgttttctaacatgagcctgcaccgccagctcgtccaagtctcttttcctggccttaattaacacagctctccagcttccaacaggctaatgacgaatcgggttaaattccagacaacagccgcgcaccgccatcaattagccatctccagggcagcttcattaataagcatcgatcacggccctcctcctgaaacacgccagggtctccaggtcacgggcactgcctgcaagggtgtcaggctcaggtgtgggtgtgaatgtgtgtgcgtgagggctggagtgtatggtgaggggtctgcacgtgagtatgtgtgcaaggatgtgggtgggccatgtaaatgggtgactaggagtgtgggaggtgtgtgttgcatgtgcaaatgcatgtgtgtgcatgtccatgtgtgagtatgcatgtcagtgcatgcagtgtgtgtgtgtgtgtgtgtgtgtgtgtgtggaggtgtgggggtgaatgggtgtaggtatggtgtgtgatgtgcgtgctgtgtaagtgtgggagtgtggtcaggcgtggccccctgctggcctccactgtaccctctctagctctcctctgaattccctgtcctccctggcctgtgtctgggcaggtggctcaggtcctcctcgacccctgaacatcagggttttcacaggtgcactgcccctaaacctgccccactctcctaccccttagagactctgcctgtggctctcttcaaccttcactcccttggaggtaattccaaaatctccaccgccatcctctcccttttcctcaatacatgctgaatgactggtcattctccctggcatggcctccagcccaaggcctgacacccgcagcctgctgtggcaggaacatcaccgccactgcccaggggcccaactccctccctccaataccttctgctcccctagcttggactccaactctattccagccattcatactctcagtcttgatggtcctgcattcagcctcctgtgacattcttcgcagcgcacttctgagccctgaggagcagcccccacctccccagatcatagctcatctcctcagtctgctggccacatgccccacagccagccccaggagcctcgctcagggagggctcacagccagaatgcgcccctcacggctgtggtggctgccagtctcctcctctctccttttctctatcctgtgtagggcctcactctgtcacgcaggctggagtgcagtgggctcaggctcctgcctcagcctcccaagtagctggggctataggcatgtacctccacgcccagctaatttttaaaataattatttgtagagaaggggtctctgttgcccaggctggtcttgaactcctgggctcaagcaatcctcccaccttggcctcccaaagctgagatcacatgcatgagccaccccatgtggcctatcctgtgtagttcttagcatggcctcccctccacaagcccaggcccccaggacacctcagtgggaatttgtccacctgccatttccaaaagcctgctatgagggagtggctggggtcaccctcagactcatatgtgtgacagtgtgcccagagagcccacaggccctggcacacgtgcatgccagcagggatgggatgtggcctcctgaggcggccaccagcagatcatctccttaaaggttaattaagaacctgaagctggccagcgtgcgtggccgatgacggtggatgcggcgtctctccaggccattaaacactaattaggtttagaaagtctatcgagctcctgaggtctcgtcaaggcaggcgctggccctggggtgccctttgaaatgccagtgctgtcaccccaacccccggcggggctgccgggctggccccatgacccggacccgaggcttcggctgcgtcccacttcatttctttccatttcattgtccctcctgggccctggccgcctccggctgtgctccactcaccatgcctggcgctcacaggcctggtggtctgcctgtcgacccttccatgctacatcctttctgctcgggcagcatctcctgtctctgcttcctcctcagtggctcagagacactggtcagaaacaggcctgcggtggccctggggtctggtgagcaggacaggaagctaacggtgtgggcccaactggcctgggctccagtgtcccacaagcggagggagaggaggatgtggtggggagactggcgagacccactgcctcccatggtgagcctcacaccctccccttgagattctccccatcttcagagccacctgagggcctttcctgagatggcctggcctcaatactgcccacctttagcacagctcctgtgtccccagagacccggctctctagctaggaccctccttcccagggtctaatttctttcccggctgctgagttcagcaggtgccaccaggaggcagctgttcctgatggcattcattcattccctccctcatttgttcacccacccatctgactgcagccctggcatgttccggagggcctgcggaggaaatgcccctgcaaggaggccccctcagtgactgaggcttcatctccagatggcagcgtcctctgcctcggaagtcatgttcccatcaccccggcccctttatcttcagcacaaatggtttgtcacatggtgcgagatttgccactcagtgacagaagcatgctcatgctcaagtttaccagaaggaaaagtcactctacctacttccacctctatgctctcccaggccactgtgccagggacaggattcttggtttagttcttctagaaaagttgtgaagcagaaacaagtttatctccagttctccctgaaatgcctgtctgtgtttaacctgacccccgccccatgtttgcaacaaacatctggaaaatcaccactgtcaccaccaccatgtcactgtcaccattgtcatcactactgtcactgccaccaccaccactgtcgctgccaccatctgttaccttaaccttgtcactatgactgtcactgacaccattgtcaccactatcattgtcaccactactgtcactgccaccaccaccactgtcgctgccaccatctgttaccttaaccttgtcactatgactgtcactgacaccattgtcaccactatcattgtcaccactactgtcactgccaccaccaccactgtcactgccaccatctgttaccttaaccttgtcactatgactgtcactgacaccattgtcaccactatcattgtcaccactactgtcactgccaccaccaccactgtcgctgccaccatctgttaccttaaccttgtcactatgactgtcactgacaccattgtcaccactatcattgtcaccattatcagcacctctgtcactgtcaccactgtcactaccaccatcatataaccagtaaaaaatattgcttagctcaaagagatactgctagtgatgggattctgggtgctggggtggcgggggggctgttctgggtggagtggagccttctaggggcccctcacaccccatgtcatggcaggcccctacaatctttgggctccactgggcaccaggccacgtgatgtcatgggaacagcatgactagctcggccatgactaccggtgacctgaactcaaaataaaagattttaagctctctgtgctcttgcttcatttaatggacttgaaaatgcaggagccgtgtgtgtgtgtgtgtgtgtgtgtgtgtgtgtgtggtgtgtgtgatctaccttcacagggtggctttgagagcagaacaagccacatgggcaaccatgcccagcgctgtgccccagggccagcttgacgtcctttttcttccctccacctttctctctggacaatgccctgaacccccactgccccaaggaagaccaggcaagaggatgggcaatggccatcgtttgggtctctgcatccatcctggtcccagagcccagggttcctagcctcctttgacaggcagagctgatgcgggctgtgtgggcacaggaggcgcagcccaattttataagcacaaagtattatgattgcattgatttccatcataaatcatatttcctatctcctgcctctctctcctgcacaccccaagttaagccttggtattttctttagctgctgccactgccaagcctggagatgatattaggataatgatgataaattttaccctgctggcaagccactgcttctgtatgggggagggagagtgtttgtcccccaaatggatcccttgaccagaaagtgggggcttggcttgcgcctggaggaaggaggatgctcaccagagctcggctatgtgggtccatgcagatggataggtggatgcatttgtgtgagcatgagtgtgctcatacatgtagtcatgtgtgtgcaaagcctgaaaggtggccaggcacagtggctcatgtctgcaatcccagcactttgggaggctgaggcaggtggatgatttgtggtcagtagtttgagaccagcctagccaacatagtgaaaccccatctctactaaaaatacaaaacataaccaggtgtgatagcacacatctgtaatcccaggtacatgggaggctgaggcaagtgaatcgcttgaacctgggaggtggagtttgcagtgagccgagatcgcactactgtactccagcctgggtgacagactgagactctgtctcaaaaaaaaaaaaaaaaaggcctgggaggcatcttgctgggtttctcgtgtgtagacgcatggtcatgcccctgccaatgaatgaacacatagcagaggggggcagggggcaaaggcaaggggagagggtaggcgctgaacttcccaaggtgcagccactcccagccttgggattgccagtgacttggggttctgtgtgtccggctgtttcccccatagagtgcaccccacctgccatcagcgcattaatccttattagcacggctgcgttaagccctttcctccttaacagcctcagcagcttccattgtcatgtgattgaaatggggtctccccctttcctgactcccaccacaatgcccagcctggggggcactgataggaaaatgtccgcacacattttcctaccaaccccagcctcaggaaatcttgccgaagtgcagccaacaaccaggctggggcacccatcctgacctcagaaatgccacgttaagtgagagtgagaagctggttagtggctctccgagctctcagccttgtgcctttgccagctgggctgggctcagccctgactgagttggggctcctccagcaggtgataatgtcactggggtacccagaccaacatgacagtgctcctcacaaggtcctgggctgggtcttaatacagtgggggagtccaaggggagcctgtaggttctctgaattggggatgagcctgggacaggaagaagcttcagtggggacatggtcttgtggctgatcattcattaattctcttgttcattcattcactcaacaaccattcctgggctgagttccctctcgtctcccagtcccacaggcctgagggtggaccccagtggtcagtgggctttctgtcttctacaccaggggcggccagcctgagatccctgagcagaggtgtgttgggttttctcagatagtcacaactaaagaagtcttatttttgaagaacgtgtccatgctgatgtagttgacaatgacagtgaatcacagacacagagaagatgcaagggctctaatcctaccaggcacaagctactggcagcatctcacaggcaaccctggtttgaatgcctctgctgactggaggctcactccacgcatgagtcagctgttttcatctattcgacattgtttcagtgatatcaagctaacgtctgagccacttgtagcttccactgttcagtccccagccattcatacaggaaatgcctaacttctcttctttagaataattgcttaaagtagggatggtgaaaagaaccaccttggtgagcagggaagggcaccaaccactcagactccccagtgaggattcagtagggcacttagataggaagtgaggtttcagggcaggatttggctaccatgtgcaggaaatggattcatcatggtttgaataaccaggctccatgggtgtggctgtgtgtcctcccagggggccttggaggggacagcaggttgggctctggtctgtgtaatcagcagccctgggatcccagaggggcagactgggaggaaagtgcccacactgggcagctagctcagcatgcgatgtgctgctgacagtgggagtggtctgggccacagcccacatggggatgtggcatttaggtcaaaatatgcagcgtgttcagacacaggagaagtatgttcaccttacatgaggagggttaaaggagactggggccactcagcctgagcaggtgcaggggcatcccactggaaggcagtgagtggagggcataagggctttccacctggctctggggtcaggacgttgcagacagttcacgcaggaactcctggtccaacatgggcacaggctgcctggaagctcagagtgtcctctgccccatgactgtgctctatccagcagaacctatgggctgctgtccagcatgctccagaggggaccctgcctggggtggagttgggccagtgaccacttaggttccttttgactctaggagtgtatgatgacaaaaggaagtgctcctaggagctaggatggtgaaggtttcaatccaacaatgcttgcctcacagcaggcacttatcgttctaatggatccctgatgccattaggctgaagatcttcctcctccaggaagtctctcctgattaatcccacaactctctgactcatctgggtctccttgctaagactcgcttactctccttgtttgtgatctatctgtaaatggatgtctgcaggttgcatgtctgtggtgcttggtgttgtgtgtgtgcgtgtgtgtgtgtcccaatctcctctcaggtggaggacaggagaacagtggagctcatccttggtgccacacacaaccttttcttctccaccagccccttaacttggtctcttagagccatccctggcaattgtgtcctggtagggctgtggccattttgtatccacataggaattcagattggggaaagataacagcacatgcacacacacacacacacacacacacacacacacgctgggcacatggcagcctctccacctcctccccagttttctgttcctgccagcagtccctagggccccataaagatagcaaccttctctgagcaggttaggcctggagagtgcaagggtggaacagtctgagagccgggctcagaaaaagtgaccccatgttctgtttcctgatgctgcagcctggtggggaagggggcctgcctcggagggtgagaggcctctgagaggcagtggagggcaggagtgaggagtgggcaccaccctcccctgtgctctgcagctgtgccccttcctcatcccagactggaaacagctccactgggcctcaggtctccccagggagtgcaggccagggtccaagcagagtgggggagcctgggttcctgcaggcatctcttagctgtgtgaccctaggccagttaacctccctgaacctccatgcctccatgtgggaaagaatgggggaaataataatccatattgagctaatgtagataaagatgtgttgtgagctacatgggacaaaaactaatgcaaaaaaagttgaatctcaccactcccattagtgcaaggaagccccctgggttgcagcgtgaaggattctgtgggtggtgtcccccccaacccctatgtcatgtccctggcggtccccatggcatgtgggtgtctgtgggaacatgacccccactgggagttgcccactgagccattcccgtccttacactgaaggaggagatcctggaaatgaaacgtgtgggcggcaggtagatgtgggagctggaagggtgtgcaccgtgtgaccacaggtgagaatcgctggtgtgctaagaacagaccaaggcctctggaaacacagggaagcttgctgtgcttatgcctgtgctgggctagcagcagtgtcttctacccttactttctgaattttagttggtgagaagaggtagaaaagaagtgtgcatgggaatgactgcgtctgtgtccctgtgtttgcagcagttttgttgtgaggccctgtgtgcatttgggtgtgggccattgtgttgagaatgggtgttgattctgtgtgtgtgtgtgtgtgtgtgtgtgtgtgtgtgtgtgtgtgtgtgtagacacggggtggggagggggatgccacttctgggtgtgacatcccaaaggctccaaaatcctgaaatcttagagggcgcagagctgcatacagccaccagatggcagccgggtgcagtctaagggttgccggccaggctcggctttgtgttcagcctccccacctcccatcccacccctggtatatgtggtgcatatgtgtgtatatgtggggttgcgtgtgtatatgtgggggtgcgtgtgtatatgtaggagtgcaggaagggactgcctgactgcaagctgggcacctgtgcgtgtattcagagtggccagtctgggcatgctgcatcctcctccttgccatgacagctggatgctgctcgtgttccgtgccctgcgaaccttggctctctaagaatacgtgtgcagacaagtgtgcacatgtgctgcagcagaccccatccagactccccactcccaaaccctcacctttcactcctatcaggctgtccacttccaactctctggtacccctcaccacggctggttcttccctccctccttcaccctggctgttccctttgccaggaatggtctctctgcaaccaaactcctccccatttttcagagacttctgtctaagaagccccttctccaggaagcccattagatctcttagcatcaaccttttacccccattttgctccttttctgatcacccattgcctaggactgtcagctccacactgttcatccactgctggcttgatgtggctcattcaggagccttcctcgagaggttgagttctgcagggtaggatggggctgggcatccacagtaacaccaggtaaaaaccagatcattgaggagcacatttccccactgacctgccccatggggtccagagagcaagtgctgaggacagacgtggcttacacatggcaagcaacccgtgaaacacagaacaacccgtgaaacagagaacaagtgactccctggaaatttggcaggcattgccacagcactggggtgccacggggcagagacagggggtcaggggagaaagaagtaacagtgagtacagtggctccctgggttttaaaatccaaagttaagccatttgctttctaggaagtattgaaaggtagcattataccttggctatagcaagagaaactacaggtagactctggaagaactggtctttgccgaggtgaggaaaggctctggtgtgagccatgaaagcttgttcccttggagttaaaaggagccagagtcaccatgcatatgtgcacagctttctgtatttttcatcatgtcttgctatccatgcactaaccccatgttacatgttggcagagggttttcagaggcatgcagacgctcgtgaacctgaagacagaagctgtcaccattcctgtttgacagatgacgggaacggctgcaaggggaggggacacgccctggcagcccagcttgctggtggccttgcagcatcctggatttcatccccctagagatgcacatgaaaatccttgccctttttgcagactctaagaggggagtgtgccctccctgatcccatcaatgcctgtagcccccagttctgctccacctgccagaacccacttcctgtttgtccagagatgacccaagtccatgtttgcaggatgtagaatgtgctggggtggagaattggagaatggctgtggaggcggacagaaaagtttgggtgcctcgggaggctctgtctctggaggggctggagtccccaggactggtgtacagagctcctataaggatgggtttaattaaaggatcgttaggttaggccaggtgtcatctcagcaggggctacccacaccagcccattccccaaagaagaactgcaagaaagcaagaaggttcccttcactcattttaattgttccgcaaaagaccctaaatgcaagacagcatcataaggtggaggagtgggagagagacgaagtggagagaggggcagggagagggcagaacagagggtaagaccagcagccaagagctgggccctgggcacagccagcctctctgtgagctttgggtgtcgggggtggggtgggggacacaggctcccctaagggatggctgcatggccttagagacctcggttgcagcaaccagcacatggtagatgctcagtagacattaaaatgaactgagtgctttggggtggggtggggcagactttcctatgggtggagtggcagcctggggaattcagtggaggactcctttggagtggctgaaggcctgggaggctctgggggaggaagctgctggttgggaaccccacctcaagaaccttttgagcaggtgtcctgctgctctaggctgaagggagaatggaaacaggccccagggaggctggggacccctgatatagaaaggcacagcctaccctgaggctgaggtctctccagtctcctgggtctctcctgcataccttagcactcccaaaaccacccacctacccaccctcttcagtgctgaggtggctgaatgggctctgaggctcccagtgcatgcctggcccccggagcccccaggagttctgtcccatttcctggagtggcagctgggcaggttacatatacttaattactagtaattaaaaaactgattactccaaatggcgccctcctggggagaaccgtgctgtgcctgtcctgctggtccgccacagaggccatttctgtagtgtggagcagggaccagcctgcagcctccttctatgtctgctggaggatgagggctccctatgtcaagaacagtgcctgcccccacctcctccaactggcctgccccaatgtctagtgcagctgcattccggcatcactttagtggatgagtcactggtcccctccaatgtgcatatcccttgggaggggacatacccagaatgctataggtcacagggaaggagcctctgtagggagcccagggggaaaaaagagctctaggctccaggggagaagtggggaatgaatgcagagtgtgacagaggcagggcaggtttgccagttgcagagctggtatcctagaattgacttgttttagtcattctgcgactggggttcagcaagcacctagtacataccagatatggatggaccacctagtcgggttctttgtgtggatgaagacacgccaggaggtggggggcaggtacatgagccatgttcagttaggaaagtgctgctggaaccagggcagagaagaaaggggtgcccagttaaatgggcagttggaggaagcatcgcagaggagtggttattgagggcgaggctcgggattggagtcagtttggggaggagtaggtggaaggggtttgggcaatggcagctgcttgtgcagaagccctgggggattggcagagcctggcaggagggaggaagcctggggcagccatgggggcagcatgtctcatgctaccgctgggatgaggaagtcagcggccccatgatcccatcccagggtgtctgtcttccagcagcattggggagtggtggacggggtatctttggtggatctggagaagggactggctgacctgagcctctgagaacagggaggaggggaagaaggggagtgggagagtgagggctcatatgccaaggctgaagggggagggacagtgggtgggtctgggaggtgccttggagagggagcctcctggacctgctgatggagggtgttggaggagaaaggcccaagctcacaagagcgaagtctgaacagacaatggccaatacctcagatgaccctgagggtgggaagtctgtctgtaaacttgaccaggaagagaatggggagccccagagcgtggaggaggggtgcacagggagtctccaaggtctccctgccaccccccacgccacgcccaagttggttggtgacagtggccacgaagggaagattcatccgaggcccttgtgtgggagatgctgacatgaagccgtgtccctcaatcaggggaaccctgggccaattattcatttattactaaggggtttgcaggcccatcccccacccctacacttggctctctgtgcctgagtctgcttttattctggaaagtgtcccagagaggccctgcctcacagccactcaggtcccttcctacctctctagttcggggcaggtcgtcacctgcatgaaggacccagggcggccgcacaccctctgctggaggttccttcacagctctgcccctcacttccctttctcctgagcacatgtctgcgggcatcaagccagccccaaacctgcccctgggcaccctggcaggaggagccaagtagaggggtgccaaatccagggtacccaaggacttgggtacacagggggcaagtcccacaccacacagggggttgcagcaggtgagaggccagaagccccctgcagggaggaagaggacgggcttggtttggccctgctgacctggctgctgtggcctgtgtccttggattaaggctcaatccaagatgggcctcccagagggctcccctttattttcttcttcgagagagatacctcccacgttcccagctcagaaggggccaaccaggtggctcaattcccaccctgagaaacacaagcaggtggttatgggtgggcctggtgcctgaggtcagcaactgaccctcctccaggccgggcctctggtctcctgcccgcctggccctgtgccctgcatccccagttccgtctctgcctttgtctacctctgcattttgctcttctctcttgcgcctccttctctaaacagccttttggaaagagcacagagatcagttactatttgacccctcttagccacaatttccccacctgctaagcagggtcaaatgcccttcacgtggtgaggtgaggctcaggagctacacgcacacactaggcccctgaaaagcctcctgggccagagcactcccagcttacccagaaagaagggcttctttggtcccttccttttttgcccactgaagccttcctccctccggccagggatgtgaatgcacccccggtcctgtccatcccacatcacatcaggcgcttccgggcacggaccatctgctccacaaccctgcttctctatgacacagcctctggggccaggggctcaagtgggatcttccattttctatctgcctggatttggagagcaagggacaggaccatggccttgaaagtcttggagcagtgaggtggggtgggacggtggggggatgggagcaaaattccctcctcctggtcttggcttttgcggtttctatcctccaaaacaacaacaacaacaacaacaaaacccatcgggggtcattcctggtctcctcactcctccattactttctcacacctcctttcctccttttcttccaggagcttttattatcacacactccccaaggcaaggcccagcccatcctctgcttctaggagaggggagaggaagaagcagtcactcaaggccaccctggggctgcttagagactcccccaggggagctgcactggggggtctctctcccctctctcatgcctccagggggtttgggagaggctgcaggctgatcaaactggcccctgaccttgcctgctttgctgatgaatgcaactctccaaaggtggaatgagctggagatcgcagggtgcaacggcagcacatccatggggcctggagagagccctgggaaaagtcagggatgaagcagggggaggtgctggacacagtttgaaggtaactcacacttcatggaaacagtgttcggaaactcagagatagcgcaggcggtttcggcagttcccagttttctgaggtgggccctgccctcccaacctgaactcgcatcaaggatagccaccaggatgtccctcctatctgtgggtatctgtttaggctctcaaagaagagggacacgttggggggagaaactggaaacttccttgtccaagtcagaggccctggaggggcctatcagcctggagatgcgatgccttccctaccgtggctggattctttctgtagcgggtttagggaggaaggagggaaccaggagatgacacaataggcttaaattaaagcaggacagattatggcaggcctaaagaatcatttctttttttattcagaaggcaatggaaaagacacactcatttactccaaagcacttattgtgcatgaaggacaggcagcccctgtgccaagcgctagggtgtatctgaataagacacaggttctacctgtaaaccaataatgcaggtgagctaagacccagacagcagcgtgggccagcccatcggaaccacagagctgtgagtgaccaaggatgtgctctagggtggctggtgcagttgattcctgaaggacaaacaggagttttccagcagcacgaggctgagaagggcattcgggcagcaggacagcaggtgcaaaggctcagagacagaggacctgtggtaagtggagtgaaaggtgaggggctgcactgaaaaggggagccggccagagttcacagggcaagggatgggtgaggggagaggcaagcggtggcccctcgatcacatgcgacgtgactgggtttgctttttagtaaacactggcagcctccaggaggaggagagataagcaggcagggaggacccgaagcaggctgtggcagtgcaatttgggagagggacatgcctgggacagatagaggagcaagaatccatagaattttatgtccagtgaggtggatgaggggccttcagcaaccagggacaggcacacgatgggaacagagccccattctcctctgacaaatgcagacactttagcaaactgcctgcagcacacagcttaacatatgacgaccaagactttctacgtgaacatgacttgactatccagaacattctcatccaggaagcaaaagatgcaaataactttgttccaagaacttcctgaaaatccaaatttctgagtaatagaccacgcgcgctcctcttctcaggacaacagctcactcacccggacaaatctgctggcctgtgaatggctgtttactcatcctcacctgctcaaccctggccttgctctgtctaccagtttctaaaggattatgtcacagagcctgtccgatcccaatcaatactgcacattgcaggacccaccttcaaacagacccctaacctcccctttctgaaatttcccgaggccaccaaggtggggttgctctgttttactgagctaggcaatctgaacttggctttactgatcagtggattattctgctggtctctttgggaaatgagtctaaaatcagatgacctcgcaagggtccctttatctctccgagtctagcaggctccaaatgtctgatggtgggactacaggcttatctcacttaagaccccaggattctgggatccccagttccagggctcatggtgcatctggcctgaagtcctgagggtcaccaagaggagagggcatggtcaggattccacaacagctggggagcaggcctggagctctggcctgggccagtcttgggtctctggggagcccccactcagagagcttctcatactgccttcaaggttacccaagtctccctgtcggtcacatccctacccacctccccccttctttcagggttttatttttggccaggtaattagtatagctcttctcattaatattacatttaaaaacgcaaaggtgctggtgggggagaggggggctggaagggaggggcttgcacatgccagtaattgtcttgacagccggagatcctggtgcaatgacagtctagtttaagtggcccaattagcaaaagaaacgactcgccaaaagttctgaaggcatcgtgttgattaatgcaatttatcttgcataccagcagcagacagctgaatcgctgctaatgattattatatacattcatacacattatgtacatgtggcctcctctccaagaaacgatgcctctcccctctcctcctgcgtgcctgttcaggcccacgggcccaacgtataccagaatgactctacctgccctgaacctactgcccaggtttcccactggtcatctgtgtcctcaactctaattgccaggttgcctttgatatgaaagggctggttttactttgatattatattcaattttgagccagtgtccagaaacacagttttcagctttcttttttcttttctttttcttcttcttctttttttttttttttttgagacagggtctcactctatcgcccaggctggagtgcagtggtgcgatcttggctcactgcagcctccacctcccaggttcaagcaattctcctgcctcagcctcttgagtagctgggaccacaggtgcacgccaccacgccctgctaatgttttttgtatttttagtagagacaggattttgccatcttagcgaggctggtctcatactcctggggcctcaagtgatctgcccaccacagtctcccaaagtgctgggattacaggcgtgagccaccaccgaacctggcccagaaacacagctttcaagaatatttttcactactcaggggaagcagctctaggcagccaagggagtggccagcagatgaagttagcatagtgaagtctgtctgagtacatgggtctctaaatgtttggtccacaatcacagtttaaacgagggatgcatgcaatgtggtgctgccaacatcctcctcccttccatcttaaacatcttgttattctgaaaactgggaatttttatcctgggtgtgcaagggcagaagcccagaccacacctttgcaggtgtccctccttctgggcaaggccaggaggagaacatcagtgcaagccaccaagcaaggggactatgatggctgtcagttcatgctggcacagccgtgagagcttacacacactacatttgtcctcaatgttacctcctccccagcctgcagaagggaaatgtattgctgcatgttgtggctgatgcctgtaatctcgacactttgggagggtgaggcgggaggatcacttgagcccgggaattcaagaccagcctgggcaatatagtgagacccagtctctataaaaaataattagccaggctggaggatcccttgaggccaggagttcgagactgcagtgagctatgattgcaccatggcactccaacctgaaccacagaatgagaccctgcctctaaaaaaaaaaattaaaaataaaaaaaagaattttaagtatctgctttggattccaggcagcctggccctagagctggtgttcccttcatcactattctcagccaccagattaggtcagaatctggaggtcagcattggaagcgggggatgaaagctgccacttggaggtggatggggaatttaggcaggaaagtctcccaggtagagatgccaggactcagctgagaggaggcagctgtgaatctggggagacagacaccaaggtgcagagtgggacggggtggaacagcgccttgccattggtgcccgaatgcaccagaggctgggagaacaagaaccctttcttggccgggcgcggtagctcacgcctgtaatcccagcactttgggaggccaaggtgggcagatcaggaagtcaggagatcgagaccatcctggctaacacggtgaaaccctgtctctactaaaaatacaaaaaattagccgggtgtgatggcacgtgcctgcagtcccagctacttgggaggctgaggcaggagaattgcttgaacccgggaggcggaagttgcagtgagccgagattgcgccactgcactccagcctgggcaacagagtgagactccgtctcaaaaaaaaaaaaaatatatatatatatatacataaaagaccctttcttggggggcttagggaccaggggtaagctcaactgggcatatggttttatagttaaactttccagtgaggccagattcagcaatcccaggggtcagcaatggagtgacggggctggcccctgtggaagggtctgaggtgatggcttgggtgctgaggagagcagtggatgtgggggaaggggaggttggtgtggagctgggagaaccaattggaacatcctgcaaagggcttggaggcagctggcagcaatagggcatgggggaagaactgtggggacttgggtcagcaagcaggagagaccaggagccgttcaaggggacttgaagattccatgacagtgatgcttttgacagtaataaggatgttaggtggggctgggggaaaggtgggggactggggatgagggggaatgatgagtttacctttaaccctgcccagacttcaggtagaaatgccaaagagaccagtgggctggtgggggcggggggggcagttctttctttttttttttttttttgagatggagtcacccaggctagagtgcagtggcgtgatctcggctcactgccagctccacctcctgggttcccgccatcctcctgcctcagcctcccaagtagctgggactacaggcactcaccacacgcccagctaattttttgtatttttagtagagacggtgtttcaccgtgttagccaggatggtctctatctcctgacttcgtgatctgcccgcctcggcctcccaaagtgctgggattacaggtgtgagccactgcgcctggcctgtggggggaccagttcttaggacaaaggtcagagccggagatgtgagtttttacttttttcccttaggacttgggcccttaggggaggaagtgaactatgctgagcacctgctgtgttctagggagtgtgccaggagctcacttcccttcccaacagctgcatgaggaagcaccgttatccccattttacagatggccaaactaagtctaggtgagtgaccttccagggccatgcagagtaagggaaaacaagctcagccttgctccagtgctgtcagacctccaagttcattgctgggggaaatgaagcccatgcttctgattgtggggactggtggggggcgcagagggcctgggcttttctgtcccaatctggggtgcctgggagaactgagagccacctctgtgagtacaaggccaaggaatttcttccacagacccatgctcggctgcatacaaatgtgaacttgaaaacattctggttcccgtaggtaggtaaaaatgtattctctcagcaaacgcttttgaatttgggaccaggctctaaaattggagccctttggggttggggtggtgccacgttggcttctgctcccctgactccttacactgtggcttgcaggagaggtgggtgcactctggggtgagcagaggcccaggatgggggacttcaggaggaaaagggccctctaggccttcccaccatgccttctctccagccttcctgccccgcaaggagccattgatgaacctgtttgcaaaagttctaaatgctcaccctgctgttcagatcattttggtaattctggtttgtggtgggagccagggaagtagcacttaggcctcagtgaggcctctgcctatggagagagatatttccataaggaagaagcctttggttttcagcagctctttctccagacattgagagcagggctctgagggtatgaagttgatcacgtgtgtgcctactgtgcatatgtgcatgtgtgtatatgtgtacacgcatgtgcatttgtgttcctgtgcctgcaaatgcttgattttgtgtctagacacgatggaatctgtatgtgactctgggagagagacagtgtgagcctgcttggggatgtaaggtgtgcacatacaggacatagagttgtgtctgtgaatgtgctccttgttactgatgtctgtacatctgtgagtgtgtgcacatgtgaatatgtttgagaagatgagattgcctgattatgtccaggaatgcatgtggtattgagtgtatatctctgtgtgtgcaggtacatgtggtgtaacatggaaagctataaactttaaactgaaaacagacctggcctggtgcagtggctaacgtctgtaatcccagaactttgggaggctgaggcaggtggatcacttgaggtcaggagtttgagaccagcctggccaacatggagaagccctgtctctactaaaaacacaaaaattagctgggcgcaggggtgcatacctgtaatcccagctacacgggaggctgaggcaggagaatcgcttgaacccgggaagcagaggttgcagtgagccgagatcacaccactgtactccagcctgggcgacagagtgagactccatccccacccaccccacctctccaaaaaacaaaagaaagaaaacacagacctgaagagagagagtgccatgatgaagagtgggtgaccaggccaggcagtctccctggaggaggtggtttctgagacctttactcagccatacctccaaaactggcttccctgggctctgtgccactgccctttggagtcaaaccagccaggagccaagactcagcaggcctctgctagggagctgcagtggggatacctacatgagatggggcctcggaatgccctggaggcatctgttctgagccatcactgcagtctgtcttcgtcagccacaggcactcagcccagcacagcccagcccagcccagccctggcctggccccagggtctctctggaaatggtagtatgggtgcactgaggccgtttattttctgattcaggtgacagtccagtggccaaggagaatacccacacctttccattttctattaggaaccactgaccaatggacagaaccaccatggggccatcaaagccacttagttgagtttttgctttttaataagaaaaaatagtatgtggcactcatccgcttttaaaatgaaaaacagtgaacataaaacttgatttaataaagacaccaaataaaatattcttctattctgtgttacagtaattgaagggagagtgacaaaagggtggggggcagaaaagaaagagagaacggttgggtgtggaatggcagcccagaaagagacaaggacatgaaagaggtgctggaaaggccagaggtgctgggaaggtcaaaggtgctgggaaggtcagaggtgctgggaaggccattggtgctgggaaggccagaggtgctggggaggttagaggtgctggggaggtcagaggtgcagagagtaaagagggagaagtggattcaggtccctgggcactaggaggaccccagtgtttgcagggaccaacatcaacgaaggggccctcctgggctggcagtggctatgcttgacatctgcttttggccacatcctctcaataatcccaaaagctattaaaggaaaggcacatggcatgcagcgagcttcagtaacttgcctgagtcctcagctaggctgccttctgaccttggtctctctgaccctgacccagatctctctaccggcagcctgggtttatgccaggcactcggcaccttgcttagcctcaggtgtccatgccccacacttctctgcagcctcccctgggactttttcctacactcttcctctcccagaggcctgtactctgccccttttgcaggatcccaggcccaagctgcctccagcccctctcctacccattcatccacctgccccaggttccaccactcgcttcactgggtcacacccatgccttttagcctgaaatgcccatggggactacataggtttgtacaaagcccagtgggagacttggaagagggtctagcagcatcagagaaagttcccagaggagctgaggtttgagcttggagcccgcaggcctgtgaaggtctgagaacattccaggtagagggaacagcaagcgaaaaggcaaggaggatgatatggtttggctgtgtccccaccctgcatcctagctgctccagctggggctgaaaggggccagcgtagagctcgggctgtggcttcagagggtgcaaacctcaagccttggagcttccacgtggtgctgagcctgtgagtacacagaagtcaagaattgaggtttggaaacctctgcctagatttcagaagatgtatggaaacgcgtggatgcccaggcggaagtttgctgtagggatggggtcctcatggagaacctctgctagggcagtgcagaagggaaatgtggagtcggagcctccacagagaatccctactggggcactgcctagtgaagctgtgagaagaaggccactatcttccagaccccagaaaggtagatccaccaacagcttgcatagtgtgcctggaaaagccacagacactcaacaccagcctgtgaaagcagctggaagggaggctgtaccctgcaaagccacaggggtggagctgcccaagaccatggaaacctacctcttgcatcagcatgacctggatgtgagacatggagtcaaaggcgatcattttggagctctaagatttgactgtcccactggatttcggacttgtgtggggcctttagcacttttgttttggccaatttctcccatttggaatggctgtatctacccagcgcctgtacccccactgtatttaggaagtagctagcttgcctttgattttacaggctcacaggcgaaagggacttgccttgtctcaggtgagactctggactgtgggcttttgagttaatgctgaaatgagttaagactttgggggactgttgggaagacatgatcggttttgaaatgtgaggacctaagatttgggaggggccggggtggaatgatatggtttggctgtgtccccacccaaatctcaccttgaattcccacatgttgtgggagggacccggtgggaggtaattgaatcatgcgggcaagtcattcctgtgctgttctcatgatagtgagtaagtctcacaagatctggcagttttaaaaacgggagtttttctgcacagctctctctttgcctgctgccatccgcaaaagatgtgacttgcttcgccttgccttccgccatgattgtgaggcttccccagccacgtggaactgtgagtgctccattatactttcctttgtaaattgcccaggctcagatgtctctttatcagcagcgtgaaaacggactaatacagaggataagacattgtgtgcaatatggctacagcaggacatggataggtagggggctggggaaggctggcagggaggcaggtacccccaagacaaggccaccctgacctgtttgtgttctcctgaattagtccaggtgctttacacctcgctgtgaatctttgctcaaggttggcacaggagcaggatgcaggcgcatgcatgaaagcgcgtaggctgtagtccctccctcaggttgcaggactgcaggctccaagagggcacacagtgtgccgaacttgttccctgtggcctgacacagagtaggagttcagcaaagacctgtcaagaggctgggcatgggtggttcatgcctgtaatcctagcacttcgggaagctgaggtaggtggatcatgaggtcaggagttcgagaccagcctggccaacatggtgaaaccccatctctactaaaaatacaaaaattagctggcatggtagcatgtacctgtaatcccagctacttgggaggctgaggcagaattgcttgaactcaggaggtggaggttgtagtgagccaagatcgccccactgtactccagcctgggcgacacagcaagactgtctccaaaaaaaacaaaacaaaacaaaacaaaacacaaacctgtcaagtaagtgaaagggtgatgtcatgtgaagggcgacaagggagcctggcaaaggaataagcaaaaggcaggtcaggcaccctgaagactcagcccatgtgagaggatctcagaggtgccaaagaagggctggtcagtggtcacctctgggtgtggagctgagcagtgctgggccatctggattccagcagagccatcatttgttgcctttttagttatttattttttaagggtctcactctgtcacccaggctggagtgcagtggcgggattatagctcactgtagtctcaaactcctagactcaaatgatcctccctccacagcctcccaaatagctgggctgcgcaccaccaggcctggctaatttttaatattttgtagagacagggtctcgctatgttgcctaggctggtcttacactcctagactcctggcctcaaacgatcctcatgccttggcctcccagagtgctggaattataagcatgagccctctgtgctcgggaagttgttgccattctcctgtctcagcctcctaagtagctgggactacaggcacgtgccaacatgcccagctaatttttgtatttttagtagagaaagggtttcaccctgttagccaggatggtctcaatctcctgacctcgtggtccgcccacctcagcctcctaaagtgctgggattacaggcatgagtcaccatgcctgggctttcttttttttttctggagatggaatcttgcttgctctgttgcccaggctggagtgcagtggagcaatctcggctcactgcaacctccacttccccagttcaagcaattcccctgcttcagcctcccaagtagctgggattacaggcatacactaccatgcccagctaaatttttttgtatttttagtagagacagggtttcaccatgttggccagactggtctcgaactcctgacctcaggcaatccacccgcctcggcctcccaaagtgctgggattgcaggcatgagccaccatgccgggcatttgttgccttttaacctgcagctgcctgtttctggttgctcagctttgcctgctgaagtcctctttgcaatctctggccaccaccaccatggacactaaacatctgatccagggatggagtctcagagggccccagagacctgagggctctgggcaagcaccactttatcactgctgggccagggacctcccctgacactggcacccaccggctgcacaggaaccagcctgctgagcacaacctgtgagcaaggccttctgcagagcccttcaagtggacccctgagtggggggatccccagttaataacacgagtgagcacttactgtgtgccaagctcccttctcgcccttcacatgacaagcagggcagtactactgaaatcatccccaaaatgaggacagatgaggaaacagaggcccagataggtgaaatcacttgtccgaagctatgcactggtctgctcagagcctgtctggaggcaggcagtctcgttgcagggctatactcttcatgcctgcaggcttcttctgggcagggaaggctcctctgctggcttgatatttgggttctgtacaggcatctgcagatgtgtgggtgagttcaggaggaccaccagtgggacagagggggaactgcttgggatttgtagccagacacgcccattactgaatctcagttctaatgcgtggagctatgtgattgcgacaaaatccctcacccttgctgggtctccaaagtggggtttatttacatatgagcctgttatctttgtctttgtggggttgtcaggatcaaggaaggcacatgttataaaacaagacctagcacaggtatggcccacagtaggtgttcattaaactctagttacttttagcagccatgcccctccccactcatgttggggcccccagcaatgctggacatacattaagccttgacaattctgcttgtgaaggccattcatacaggaaagccagttgtcatttgtacaggtactttagggtttccacaagggtgttgatctttgcaagtgttgcattttctgccctggatctggctcagcaaacatatcaacccaaagggcagagttaaaccaagagctaaacttgggtgtggagagttaaagacgcaccaggattaaagtcgctaaatggggtttttggttgtgcctgtggctcaccagctaaccgtagctctcgtccaatgcatccagctgcctgacgggttcctgttcctccagggaagctggggtggggtttggcaggctggccaggctggcaagcctggggtaaccgcatgcagctgccccattagcgaagttatttagacttttgtgttaacgacttccaaaggcagcactcctcctgaatatgcaaatcgagagtcttggctgttaacaaaattagctgcctcgtttacagttgcacccctactcagctccagggtgtggcctggagcagtgcctgggccccacccaagtgtggaggtggggaagcggactagccctgcagctcccttcagctttattcccgcctctttccctcctaaggggtcactcctgctcatcaaggatgttttaagtggcttttaaagcctttgctccagcctcattgggaagactaccctcggagatgcccagccgggggagcaacctggcccattagagccattctagtggcagcccctgctggggaggcattagggaggggggcgggggattccttcccagcgcttgagagcaccgggaagagaaaggcaggagggaagaccaaaagaagcttcagagggtacccaggggcactgaggccaggccaagaggctgctggagtgggaagcggacggtcagaggagccctgtggtccccttcacctgggtcctggggtccggcccgtgctgatggaggctgtccctcagtcttggtgaaatgagcaaagggcccagggcagatgaggggaggaggcctggccacatccccagccctgcagtcaccctgacccccagggacaagtacagatcttcaacttggcgtctgaggtgcaggctcctcagcccaggtgccctaaccagtaattagctccagctccagctccagctctagctctgaggtttgtttgttccagccccgctcctcctcctcctcttaccaaatggcatttaaatgttaatcaagtcagggttgcggacgcatcactccccggcggcagccgaaggtcaaggccaagcctgggaggcagccccatctcttctgggattggcgattctgcagccctgttagctccaggcatggggctggccggctgtggggctcctaggacaaagcgggacgaggacagggttggggggctggggcacgggctgggtgtggtcagagagcacagtgcagactctgccgggctgggcacccttctgccaggacacagggagggtcacggggctgctgcagcctggggagcaggcttgctctggacttctccatgggtaccctagctcgaacaggccactggggcacccgctggctgccctgccctgcccgcgctgaactctgaaccttcctccccatcctgtgtcaactgtggcctttctctccctctcttgccagtcacctgctctcacctcggctctccctgctgatctgctgccttccagggcctccctcacatctcattctgacaaatctgctctacacgtttgcacacctcagttcaggggtcaggtggtcaggtgttggttcgggcagcttctaggtctggaccagagagatgctattccctctcaggcccctcaggagataacaggaaggaccctggcacacagtagggtctctctagattcttctggtttcttccttgcttttcttctctgattctccctgaaactcatttctcccactctctcttctccctctctgtcttgggcacacccctgaagagaattcaccccaggagcctggctgagcagccaccagagcaaagaccctcctggtgcactacagggtctgctgggagggtcttgggggctgtgtggggaggggacgagggtgggggaggttaggaggtgctgagtaggctttcatgctcaaaaaaatcccattagtagcctcccgacaaaggaagagaacttcccatcaaggcaatattttcatgtacagaaatttatcacctaccaggacacaaacaacaaataggaaaggaggaaacatttttccaggtatccaaaatgaacatgatgaaaataagtacaaacattcttcacgtgagagacttctcaggccttctcttagagccttacaactcttactttaggcagaattctaactctattgatgctgtgtggtcctagcacacaaaatcgggacacaatgaggggtggcaggtggcagacgttaccagagagttatgctagtagaagtagaacttgttggctgccagccaccttacttacaggaggatgatagaaagaatggtaagattttggtgtcatagggtatgggttttcagtgacctgaatgatccttggttaatcaaggcatgttatttagcatggcttcttcataactgggatgcaggctctgagcttgctatcctgcagtgggctgaatctttgtgcacgccccctggacagtgcctggtcccctttatgcacgtgcccctccctcccacatctgtgcctttctctgccccactccagcccctgtcttatgctcaggaccctgggtactctctggcctcctctgcctggtccttgatgcacccatctgtctgcagtgaggcggctagtggtgtggactgacaggtggggaccacatctgtcactgtgtctccaggaacctattgcttctaagacccaggggccctctgaggagaggcctgaaaaagggataggggcacagcctctttgcctggtggaggtctttgttctatgcaataccttgtcctcagattcctttaaatgggaatgtttccaggggatttccaatgaggcacgatgggagcttctgtttgcacttaggcttggggagcagtcagtgggtgcatgtgccccttcccttgctggcctccttccctccttcctgcacccgtctctcctctccccttaccaccagcttctttacagacataatgttcttggtttttgctgtttctcaacccaaggtcctttccccggggcaggagaaatgacaagtgtcctttcacttctccctggcagccacttcaggaattggccccattcccagcctgggctctagaacacatgctggaatgtcaggcactcaggccagggctgaggaagacagcatggaacacaaggatcccaagacagtaatttgaggatccagcactggggctccaggctccaggctgtggtctagaggcatggctgtggtctgcaatcatgagcctggatggggtttctcttggggctccatctccctggggaccccgaactcagcagtgcatactatccaccaggcccaggtgtctgctcagtccatggagaggatttgcccagtcttttctggttagtcctaaagaactgagaattaggaagagaaacagactgcttataagtagaaccatactcaaatgctctcatcataaggtattccaaagctaaatatgaatgatttctatgcagttcagtgatggggtatgggaaaatagaaagaacagaagacagaacctctgccctctgtagactggaaggagggtcagggaaggctgtagcagtgactatggagctcaagacgggcagacaacgggtgctagaggaggtaggagagacggaaggtcagcagggaccagggcagttacaagaagtctcctggggtggtgagaatctggctgggtcttaaaggaggaggaagatttgggaagatagcaatgatgggagaggttgctgggagaatgatttataggataggatgggcaacagcagagaatgattttactgaagtaaggggtggatgctgagcaaaagggactttaaagggagaggaagagtaaggctagaataccaagggctttgaaggctcaacacaaagacaacaggcagcagctgcagattcttgagcaggagagtagcccacagaagatagcagtgtgggtctcaagcaccctcaaagttgggcaatggagagttgattgagccctttctgaatacccttctaccaagcccgatggagtgaacataatgaaacctcattcgaagggagaagcatgtcgcccaccccctgtgaattgaggctaggagccaagggctggggtgggacctggatgaggcagaggagagaatttcttcacagatccctgaaggcggatggggcaattttttttttttttttttttttgagatggagtcttgttctgtcacccaggctggagtgcaatcatgctatctcggctcactgcaacttctgcctcctgggttcaagcgattctcctgcctcaacctcctgagtggttgggattacaggcatccaccgccacactcggctaatttttgtatttttagtagagaccaggtttcaccatgttggtcagactggtctcgaactcctgacctcaggtgatccgcccgccttggcctcccaaagtgctgggattacaggtgtgaaccaccgcacccggcctgggatggggcaaatttaaaactaaggcaacagccggacaccagatcaactcttgaaagatgatggacatagtacaatatggacatagtgttcatactttacaatagtaaaatcctgcctatgggcccaaataatcaattgagtgatcaggaacaagggccccctattgaccctttgtgtgaacatgacctggaagtttcagtaggaatttagagggaggcaggctttaggtcagcctaaggaagaactttctagcttttaagactgaccatggaatacagcatcttgaaaaggccatgatctctgtcactggagatgttcacaaaggagaagcggtatctaccaccatgttcttctctgtgtacaccatgctgaggaggatggtctctgcttccccaaaccagatctcgaggcactcaacagggtagggctggggctggaaaagctatagcgcagacccagaaagctgctatagcacagagcagcagtgtggccaggtcttcactgtcactgtagttatgtgtaacatccacaaagacactcaagtcacacccagatgtcagctctcctgtgtccaggccctcacttctcatctccacttgccaactccgaacctcacacaagtcccactagatggctcctattccatttttgcaagcaaagcactgaggctgagaggtgggtggctcatccggtcaggggaggtgcaggggctgcagtgtgcccgactcagaccccattcttccccacactccggtttggggcccttgtctggtcctctccctgctcagtaggacctgaggcttggttcccatggagatggagcctgggagaaggtggagtttctcatctgtatgagaagcccctgatctccattaggcaaggagggtcagggagggaggcatcgccactatcattggaagacaagaagactgggcttggagagggtaagtagcatccttggggtcacagaacacctggatttgaatcccagacctgtctaaattccacgcttctatttttcccactacatccagagcctccctgtctgggtggagccctccactcccatcccaccctcttcacttctctctgcttccacccatctacccgtgccccatggagctcctcttctgggtggccccttcttggtttctcatttaagaggtatttacagaaaacaccattgaaaaagccaagctctgtgggatcatcttgaaaaggagtgggagactggggaggctggcatcccagaagccttaacctggcttcagaggtgagatctgggagaagaaacttggcaagctatgcggccagcatgcacctgaggagggggcattgcagggttaatgtgctaaggtgtttgcaggaggaagaggaggagctagggctcaggttgtggtggtggtggtgatggtggtggtggctacctggaggaggtgtgacgagagagttggagagcatggagcaggtggacagaaaggaaacagtgttagtcaaagagagggggtgggaaggatggagcagccagactggaggcagacacgggggagtggggagatgtcactggagacagttcgtttggggccaggagctgtgggctcctgagtctctgcttgattctcccagccctgggaggcagcagtgggttcctgagctggggcaggggtggggatggggaggacagagggaaaggatgctctgggaaggcctttcttgtcctgcataagatgcttgggacaaaaaggacaggaaggccacggctgaatttcctaatgagatctggtgttgggtgcccggaaggtgcaatgtgcaggatggtctctaccttcccaggtgtaggaacagaggaacagaggaaggaaaaatgcaaatcaggtcggggagactgtgtttttttcttttctttcttttttttttttcttaaaagagagaaagagaacgaaagcacaagtgacatttggaaccataataccttaaagtcaatatcattacttctgatatttactgtcagctccgtggcgccggtgaagtgggaaagttcatccatctctcctaacgctgctgcgttgccaagagtgtccctctccccacctttcctttgtgcgattccagttaattgtttggctgtgttaacaccccccacacccagcccatcttccagcagagtcagggggagggtgggcttgctgagaggaggcggcatggtgcggtgcagcccagggaggtgggaggggaaccagccctgggtataaagagccaggttccagcaccgacctgaacacagcctgtgggtcatttgggtctcagtgactccatctgtggaggagacctgggcatggtgacactatatatgtcccaggatacaggcattcattcaagtattcatcaatccttcgggcgagaactcagccttcccctgccccccagcccaactttgtgaggctttggtttcctctgagcacaatgtggaggaatctgccatctgaccccatctccctcttcagccccatccttccctcctccctgcccgtctccctactctagaccacaactcagggggaattctcttcagcccttgttgcctgtcagccctccgccttgatcctccccacaatgatgtacacagcaggggcctgatggctccccagggaggggtagggagggcactgtctccctcccgcttggttcctggctggcctcccctcccactgcccatgccaaggtcctgtcccgtcttgtctgctgctgtctctgactgaacctcttcccaggggcctggtctgatttcaaatccaattttctgccataaacttcctccttctctgtgttggcagtgagcctctgtcactttcagccagcaaagtcatttttcctgcctgaccccagggtttggggtcacctcagcgtgcaaggagcaggcagctacagcatcctcctccccttccacacgagtgaatgagcccaggtctgtctagcctgtgtccctatggaacagccccgtgtgcacaccagtgagctgcccatgcacacctgtacagtctgtgcctgtggcggtgcaggtgggcatgcaccatttgtgtgcaaacatgaagacctgggtgaacacctgggcatccctgtttgggggagatgtgtggtcctggtgcatacaagcctgcacacatgaccacatgcgcactgcaaacctccgggggatcggcctcctgggggctgagtgcttgcttgggcagctctaaggtggattccagaatggggaggggaggaaggaacaagcctgaataaggttcattttgagatgcttccccagggagatggaaacctcctgcccccaggccctcccattagccaaaaggccaaaactctttttcctttccgtatctgcagcctccaccatggggctcccaacacccgaacatgtaaacctataactatctctcccagaacactgcagtgtatggtgggggggtgggcagcgggaggctgggctctctctcagggtctactgggacccaaaccctctcccagtcattgcctccaggtgcctccttgcccccaattcactgtggctacagtatcttctagaggattggctctctgggtctttggaggaacctatgagtggctctggggaccaaatgtcacctttgcccaggtgggtgagggatgtaaggattgctcctgggttttctgaaacctcaacagcatcctgtccacaccctctcctcgtatacttaagggccaggcacattgaaataattttacaattctttagacactctgggattgctccttcctctctagtttcaccatctctgccctcgttgcttatagggctacacctacacttgactccaccactcaacagctcaaagacatgctatggcttcccagtgccaaagaattaactttaaatcctatggactggaattcacagttgatcccagtgactctcgtagaatcactgctgtctctaacaccattcactttctgttccagccaggccaggccatacgctcatctctgtgttcatactctctgtgcccagccagcacaacagatcccaagagatattgcccaggaaatgtgcccatgcactgtgccttctgcatgagagctgtgcctgtctcctcctggctctggggccttgggctgtgcaaactgcagaaagccgaaacgcccctcttcacctctgctgagctgacactgcaaaagcctttgctccctctcctcagagcccagcctagtcctctggcttgcctcagcctagtattcctctgaagcagaggtacctacagcctgaaaccacagggacagggacagagaaatccagcaagcaagagaccctcagactgttcccagcttccaatccaataggtcctatcccagaaaggttctctggccttagtgtccttttatgcctcctgagggactagttgtcctgctttcccgagcccgaggggaaggaggagaggatggctgcctggttgggggccatttccccaggcttacgttactcatagatccattctactgctcggaaatggagggctccactcttcccaccttggtcttgggtgttactggaatcattacacttagaaggggtatggcaggctggaggtgccctgcatttctccagacccagtaggaatcacagaacccagatgtctctacaagggaactttgaggccatccagcctccctacatcctgacaacagtcccacttagtgacccctgctttgaggcatccagtttatctgcctatgatgatctaaccccacgagagtggccacatactccttgcacagcaatgaaaagtagcatgcttttaatgtttgcctaaaatctgactgcttgtactttccgcaggtggccctcctgttgtcttttcgagccccagaaacaagccttttccttaggaccaccctggagtgacccttttcgcagttggccctgctcagcttcacaatgctggctctgtgaccaaatgtcacgtgtcaatcatgtaaaatccttcagcgtgctaaccactctcctctgaacttagtttttgtgtaatttttacccagttcttcaattattcccagaactggttgaaacagcaaagagcagactgtgactgacacctcctcctggatgtcacacgtgtcttcaagcagtctcaagtgcaattccatccggggcagccaaatgctgctggagcctcctattgagctgtcaggagaagcacttgcccgtgggcacagcagctgtgttcttcgcctgtccctgcctctgtacttagatcctcagccccgagccttagaaagaccccatatttctccctattgaactacgtcttgttggattctacccatcacgtccatctgctaagatctcgttgcactgtttttctgccatctaagggatgcaccatttttctcagctttaagtcatctgaagattcagtcaatctaaccaacattatctttagccaagtcattgataatgtggattatggcaggaccaagctgaaaaattcatagtgccagccctggagcagttcacaggtggccaaggccccagggtgctctgtgggtccttaggaccaataactggccagaagcccagggatcctggcctcaggggatgtgcaaggactctcgaggagaaatgagccctttgtggccatcttgcccagcgccttctctgcaggaatgtagcagctcctctcctgatagaaagatccctcctttccagagatgtcctcagactgaagagtggggcttctcatgatctgcttctagagaagccctttgagcaatgccaggctcctagtgtaggctttcttgattcgttgttgagaaagggagagaagaggcatggtcttgccaccaggagctgggagggggcaatcaaggcccttggctacccctgtgaatgtgaccacagggctggcccaggatggaataaaaacagccagagagggcttggggcagtcattaagcagtgcccaggccctggggatggtatcaagggtgactgaggcttatgcctgactcaggggcccaggaagaacaaggttcttgggccagaaaggccacatgacaagcctgggaatgcatgcagttcagcagctctgagtacactcttcttaatgtgtgcatggtttcttttcaatgtgcagttggagcttgtaagaacaataacatagacaaccgagccttagaaagagaatgatgttctacttttacattgttggtgggagtgtaaactagttcaaccattgtggaagacagtgtggagattcctcaaggatctagaactagaaataccatttgacccagccatcccactactgggtatatacccaaaggattataaatcatgctcctataaagacacgtgcacacgtatgtttattgcggcactattcacaatagcaaagacttggaaccaacccaaatgtccaccaatgatagactggattaagaaaatgtggcacatatacaccatggaatactatgcagccataacaaaggctgagttcatgtcctttgtagggacatggatgaagctggaaaccatcattctgagcaaactatcgcaaggacagaaaaccaaacaccgtatgttctcactcataggtaggaattgaacaatgagaacacttggacacagggcagggaacatcacacaccggggcctgtcgtgggatggggtggaggcgggaaggatagcattaagagaaatacctaatgtaaacgacaagttaatgggtactgcacaccaaaatggcacatgtatacatatgtaacaaacctgcatgttgtgcacatgtaccctagaacttaaagtataataataaaaaaacaagaaatcacaatgaaaaaaataaccatatattttcaatggaaacaaccatttataaacaaacacagcatagatttaaatgacttgctattacttatgagactcaactgggtatatgtttaataattacccagtctccagataagatactgattatttttaatgaaataaaataatttttacttattaacctgaaaaaaaaaaagagaaggatgttctctgggtggggcagggtcctgccttagcatgtgaattagtgtgacctgttgagggctggggtgaggaatatgccaggggagggacaagagccccaatcattaaagatttcagccaagaagactccattcaacaaccgacacccttacactccctttacctggtaactccacttacatctcacaacaagccaggaagacatgcagggaaaaggtgattcccatgttacagatgagacaccaaggcaagccagagagactgaggctggagtggacgccgccctggtgagtggtggcagagctggggccactgactctactctctgttgcatgccactgccagctccaatgtgagccaggtgaagactggccctttctcactgctggttcccatcaatcagggcatcagcaagctggtctcgactgagggtgtctcacaggcgcagccatgtgcccagagccctgcccttctgatttcagatgtggaggggacgaccaggctcttatacaacctacctgacttgaccacaaacagcccatcctggcccatcactacctgagaccctggacggtggggcactgggcatggtcaggacagagcctctgctccctggggaactttgttggaacaaagaacatgctaatggcaatggtgatggttagcatcagtgatgaccagcgggtgtgtgtatttccacttgatcttcaccccagtcatgtgagaggagcatttaggacctgcattttacagattaagaaactggcacagggagggtcggtaatgtgcccagagcgagccaggtctagagtgggctctgtcccaaaacctccctgccaggtttcagactctaacagtgggaggggctggaaagcagcctggggagggtccagggaggctgtccaggcagggcatcatgccagcaatgtgcagaggatgggggtccctcgtgggagtgctcccactaggcacgtgagaggcccaggtgggcaggtacaggacccattcccaataccacagcctctgtcaagctgcctgcggactcccagcagccagatgatctacagttgctggctcaaagatgtgctttaatcgaataatgatattggggagtgaggagtcaccatacatcagctctcaccaaatgaaaaatccgaaggataatgtaggaggtgagagatgcactggagtgggcattttaccgaaatccacagcaattcacatgccagaaaggtggctaccccaccgcccagccactgagatcacaggtggctactgtgtcccagacccagcttgggcagagaagttccccgcaggtccccacctcttcactctccacctcaccatgcacccttccttagttcagccctttgaagcctcaatgtgactaatttgtagaatcaggaggtgaggctttgagccctgcacccagcgagtttggggtctgtgctgccctttgccagtgcacagggcggtcctcactgcctggtgcaggggctcatgcagctcatctccactctgacatccggctccgaacttccacagctggggctggaacatccatattccctacccttctggaagcctcctgaggagcccactcctctctgatccgtaacttcactggcaactgagaggctcactgcctgttgtgggtggccaggtctgcatattgacaatgacaatatgcagactgacaatgacatgccagtgtgcagaagcaggggctcccctggtctggccaccatgtgtacagagggtgagcactcccaggcactctggaagacgtgggggcattgttctgagtcagtctctgatggaaaagccttaggaagaccatcgtgtcccttcttgcccggttccttctcccatggaagggaggcacagagtggataagcattgtccttacccagcactgagttcaaatctcccctctgcttcttaccggcttcctactcccagccagtggccctgcctctttgagctgcagccccatcctccaatcctctaaatggtgggaggaggttatgaggtcatgtagttcagggccaatactgggacagggcccaggtgagcaggcactcttgcagttggagcatggtgtgtgcatgagtgtgtttctgtctgtgtcgtgcggtctgcctgtggtgtgtcggcctgtctggcctgtgatgtgtgtcctcaggttgggtgtgtgtatagggtgagaatcacttttccattggctgcagctggcctaggcaggggaagctgtgtctaggttggggtgggggcatgagagcccgtgggtgcatgtgtgtgtgctcatgcgtcctccaaaacctccttgccgcagagtataaatatttatacagatacctgccataaatctgcctgcctggcaaacaaatgaattgcaaaggtaactttgtgtgttgggaggggggcatttacaaaagtgctcagtgatggggttgaagaacaccaaaggaagtaagcgatgacgccggctggacggctctcggggccagtaccagggcagcagctaggtcaccacagggccttcagggctggttccttcagcaagggggcagggacacatcctagggagccccccactggcatgggataaatgcctgaaccaccccaccaaagtcagcttttcctgacctccgatgctgatgctgtccaaagagcttggtccctatagcttacttaaccctccccacccctgtgagatggaaacttaatatttccagactgcagagagggaaactgaggcccagagaaggaagaggcttccctagatggcagaggcaggatgtgaaactgagtctgagctagagccctggctcctaccagtatcctgtaccactgcccacctggcctctgggagctcgaggcctgagtgtgtgggatgcagccggcctacagccaactcctttagggctacagccaactcctctactcttccacccccaagcatctacttctaatgactgccctctccgtcctccccggtcccagaccctggcctggggagccttccccattccagcccctccccatgggctggaggaggcctttttaattgggtccacaagaactttattactgggtaactagttcctttgcttttcctgtaacaaattatcctaacgatgtgacccgggaccagatgttaattgcaatggaaagtaatcaatttcttttactgagcacaggctcctgggcaggtttgtcaggagcagagccaggcttcttaatgaggagggcactggaagtatccatcccaggctgccttcaccttctttcttcctgaccagccctcaccctttctcaataagggcagtgcctggccagccctttcccaaatggcagcctcccacctcttcaggccatgtcccttttgggccatctacctttcaagaggccaactaccttcctctggcttcctatcccccaggagatcaagcttagtcctccctcctggcacatgaggcttctgtaatccgctccaagcccctgcctggcttggtgttcttctctccctagccgggacactgcagcccagccaggccacttctctgcccctgcaaaccctgcatccattcccacctcttgctttcttctgcaattctgctctctcctgggtgtgctcccctactcttctggtcctagctcagtcttcctctggccttcaaggcttccgtgtctgcagtgctgggggcttgagagaaccccaggaaggcccccctccatttctgttctgccataatccatcatcctcaggagtgtggggctctgggtgaacgcaggaatcttggggtctggcctcaccttggtggaaaataggcaaggccctggggcccccacaatgcagcctgcagtgcttgccaggctcacctttcagggtgcaagggagggtaggtcctgttttcctctggcctggcaagggttgggatcgtaaactggagttcagttcatgctagtggatgaattctgcaatgtgctctgttagagaagctctgctcaatttgaaagcagagcagaggagagcccctccctacctctgggtacacctgggttaataatgagtctgctttcagcagggggcacagcagggagcatccagggatgggggagtgggcacaggggagggtggaggggagagggtaaggggaggtggaggagggaggacagaggaagataactaaagcaaggaggagaaataaaaaaggaagagaaaaggcaagacaaaagtggaaagaaatggagaaggagagagagaaaaaggagatgtgaggagaaaaaagggagaagggagcggccagggaaacaaaggcatcctgagatgcaggaaggcagtggttgggctggtggagcagggctggcaggtgcaggggctgtccactgcctggtaagactgcctgaggacggcctcctgcttctgcaggaccctgaggtctacatgtcccaaaaaactgcctcagtggagtccaaccctggctgcattttagaacctcctgggagcatcaaggaaaaacaagaaaaaagaaacagaaggaagaaaatcccccttcccagacaaatccaaccagaccagtctgtgggacccaggcatgggatgcttctcacgagctccctgggtgactgtaatgctctggccccagatgcagggcaggctgggctagtgccagctgaggggtcgttcctgaggcttagaaatgagagggaagctgggaacacggtgatgagagaacatggagaacatgaaatgaatgcgcacagatctggcttctgaccaggagcttgcgactgggctttcaggaagacgggtgtgttcctggggacatgtcttgagttactcaagtcgaactctgcctttggggttggggtcagaggcaggacccttctctagagtgtgcttggttccccttggaccctgctgggaaggatgcattcgttctggggcagggctgatgccactggaggaaagtgggtttctgggatatggaagggcaagggcggaaagggaagataggcagtgctctcagaaggagatgggggactagggggaacaggagagccacagaggaggcaacaggagagaacctctaaggcagtggaaagcagaggtcctgagtccagcggggaccttctcctcctccctgcgcccctacgtcagagctggctgggcttccaggagcctcgtgctgggtaggggaagatagtcacacccctggtcctcactgtaagacacgaaagagagcagctcccactcaccttgcccacaggttgaccctctccccagttctttccccatggtggacccctcctctggagagcagcactccctggacagaggctacgagaggactgctcgccccacgcccaccccaggagcggaaggtgctttctctgccaccccttgcttgttgcttgggtcgcaggaggtggggtatggcccgacagtggctccgcagggctgggccacccccacagaagggaggccagggagcccagggagggggcaggcacagagagggccataggggtggccaaggacaaattcccccgactttacaatttccctgtgagtctacaattctattaaataggataatggattttaaaatgccccgaaaagcagagagtgctgtaagatgggcggcattattgttattaacaaccgcatccttcttagagcgtcgagaggaaataaatcagacaacactagcgacaggcaagtcccgtggaagcattcattgccatgaaataaacacatatatattagaaaccccaaattaaagggaaagagcacttgggggtaagccatgcttttattttttagggtcttattaaaacccacaaatgctgggaaagccggtctgagctgattggctcatgtgcaaccagagtggggcttgcccaggctcacagaggaaggagtagctgtgggggtgcactgccccacgagtcaaaagcaggccctggggacagcatggatggggcagcatgggagggggcaggaaggccgggctgggctccagccagccagcatccctgagcatctaatttcatggtatcaaccagccttttgttctctgcaaggctgatacatccccttcaccagaaggtctcccaggagctcccaccctccctggtcttcctgtctgtgtctgaccatgctgctggctcttcctcacctgggggcttgcactgcttgtcctgcttaggctaggagatgagcctccctgcagaccttagcaaggtgtctggggcctcatccagttgttcacctgcctcccccggggcctggcctaggcaggcacctagtgggtgctgtgaaacacttagttgaatggaggattggatgagagcagggataaacagtaaactccctaaggcagaggctgtcttcactctgtttttcccctttggccctggcgtgggtatgctattgaggtgctagtgtggaagctcaggtgggctgccatcctaaaagggattgggagtattatttttttctctcttacctcattaagcttagcttccaattacgtgttaatgatgctggctgccttttgtaggctggagtttactgcagtgtctttaaatttaatcaccttcataatggccagctctggcatcacaaataagaggccataagcaaaaaaaaaaaaaaaaaaaaaaaaaggtactatcctttgctcctgtatatgccagcaagatctggggtcccatggaagccagagaaatcctttgatatctccctagcctagaaaaattctaagaaattctgagaactgtcttttgggacctcaaactgggctccctctgcttccttgctcacaaatgcaccaagaggaataaaggtcagactcagggcaggacttactgcttgtgctgaaacatgagcagagctggagaggttctcctgagagtgcttgagagatctggtgacacactcctgctctccctccagctccccattttgtgtgcatggagcatggtgttggagagaggcagaggggtggattaaacatctgatattcagggaacctcagtgagggaggccaagatgctttcctgctccggggttcctcacccttagacccacccttccactcagagggtggatgggtttcagggactcatgtgttcaggaccagaccttctgtccatgttcttcactgaaccagagccaggccctttcagcttgtggctggtgcctccactctcccgtccagttgtcctgtatttgatttgaacccaaggttgaattactggtgccaggctggcactcccaatgctgttgtgatttctcagatgcagagagaagttcacctgctctcacctccctcttggaccagctgccatccctcccacttcttgacaagcaccactcccccaactccccactttatctgtcactgtccctctggggaaacttccccagtgcttatgtggtgctgagtcttctctcctatgcctcaggttgaaggtctatgttcaagctctctctcccaactactcctcccaaacccattctcatgtctttgcccaattgcccactcacgtccttctctgtactctggcctctggtactcctgccacccatctacaagtaaaccatcagtcattcttccacctagcatccattattaatccagcatccatccaccattcatcatccatccattctccatccatctatccattcttccatccatttatttatccatctatccatccatccattcatccaccattcatccatctattcatttcttcatccatttatccatccatccatctatccatccatcccctgatttagtcatccatccatccatccatcatctagtcttctatccattcctctatccatttatccatccagtcatccatccatccatccattcaacatctctccttctatccatttctccatgaatccatccatccatccatccatccatccatcatctatccttctatcctttcctccatccatttatccatccatccatctatcaatcaatccagtatccatcattcatccatccatccacctattcctccattcatccatgaattcctctatccatgcatccatcatctacccaccatatatccttatgtatccattcatcaaccatccaccatccatccatctatccattcctctatcatccatcatctaccatccatccatccattcctctatgcatacatccatcatccctccatctaccatcagccatccaccatcatccatccatccatccatccatccatccatccatccatccatccacctaccattcatccactcaacaataagtatcaagggcatgcttgatgccaggccgtacactagtactggaataaggtctagtcgtagactgcaggaggccaggtaggagtaaagaatgtaagcaatctattaggcaattatgtcacaaaatcagacaaggcttcctgtaggaggtactctctaagttgggctctaaagggcaatggaggaggccctcatgttctgtttctgcttgacttaggccccctggctctgagttctgaactcccagaatgctgatgcttgtatcacattatatgggggctctggaaggcaggaagctccttgaggtgggagccttgcaggcaccctagggtagggactgaacactccttcacatgaacattcctttagaatgggagatagaggaggcaaaacccccatttgaatggggtctctctgatggcagggatggttttctctatttgtcctcatctttcccactacccaggccaggactcggatgctggagtttttagactgtgattgaaggatgtctttagctgctttgctgactaaggagacctccatgcctcactgctgccctctgggtcaaggctcagattcctgtcagccccagctctccctctggcttggcccactacctgcatctatgagaattcctagcaagttcctgtgcggtcccagtctcaccctgagtgctttaccactggcaagtcttactgaatatttactgatgggcccagtggagccaagcagggaagaagacacaacccagggattgtaaagggggccttcatgtgctctaggcctgggaggaggagccttggactgggaaggtggcctgaaagttgtaactagagttaaaggctcactctttatgttaaacctggtggtccttaaattgacctggtagggaagttaaagcaaaagtaaaaacagcaaacatttacttagagcttatcatgtgctggcactgactgttctaagtgcttgacttctgttgacagaattccacttcactatgaggcagggaatgttaccatcccattttacagatggaaaagctgaggcacagagaggataggcagctagcccaggcccacagagctggcatcagcagtcagcatgtgcagtttggctcttgagcatgttctaaccactctccttctctgcctctcttagcaggagctctttcagagaatgggaaacacaggtccagagaggttcagacctgccctcctgacacacacacagcaggtccataaccaaaccaggctctgtcttaggtacgatgatcccagaccaggggctcctccctcttcaccatgtatcctgggcactggagaatgcagacctgctggcccactgcttccagagcccctgtttacccctttcaccaggcaaaggtggtgaattcacacatgggtgcatgtgtacacacatgcctgagtcatgccttttctatccagaacaaaactagcaagcaggctgcctttttctctagaacacaaatgaacacagaactgagaagtaggtcatgaaggcccttagggtttattaatcccttcattgattcaacaaacgtaaaatatttacagtccgtgtattaaaactcttgtgcactttgctcatagaaagcccactctagggctattaactgccagtttacaaacaatgttgacaagctgctcacctgcccccctccacagaaatgtaagcgccctgaccctgaccctggatagagtgtggcccactcctactcctgggtggcctggtcattccagttcccatcgttagagctgatttgccagctctaacaattttattatatacataacaatattatgtatgtaatagtacatacatgtatgtatgtatgtatgtatgtatgtatgtatgtattattttttgtagagataggatctcactatgttgtccaggctagtcttcaactcctgggctcaagccatcctctggccttgcaaagtgctggaattacttataggcatgagccactgtacccagccactgatttaatcatacaggccaggaggcgctgagaaaggctgaggcctggcagaccaggcagagcagcggccactgggtgaagcaggaggctcaggaaggtagcagggagacgtgggtggtgctgcagcaggaaatggccctgtccctgtcctgggcatcctgacagcgccaccctgcatggagacaaactgggggcaggaggaaaacttggttttatactgaataaggaaaccgagagcttggggtgcattttagaaggatgtttccttcaagcagttaaaatgaaagtttaaaagttttgatgcttgaaggaggcaatcctcagccagctgaaaactctgttatacataatacttaatttccagatggttcatgtataatacagaagtctgtaatatgcagccccaggaatttttcctcccatgccaaatgccatgtggcatctgtaaaccactcctttcttttccaagcacgtccacatctcgtttgattcccatgatagtcttgtgaggcagggaagtcgggtattaaccctattttacagaagaggaaatagagacccaaaggggtgctgtgtcttgtacaagttacaactgggaccagccacagggccagggctctggtgggctagtccagggaccctgccaactcctgagctcctctccttgctggctaggaaggcggcagaccctcagcgattggaaaagcaggaattctccctaaatccaccatgtctgccctgtgggttgtggcggtgagggggtggggggcggtgcgtggaggctggttcttcctcctccttccagacaccctgctgcactgacggctcctccactgctccccacggtgctgagcttgtcctgcctcctgcatggctaattgggagactgggcagagacgctcaatgcgggggtgacagagagatagatacatggattgattgattgacgagaggaagtcgtacaggttggctagtgggagggggacaaatttggcttccccaggcttgttatctcatttatggggctgggggaggggagacactctgtccttcctgagctgctaaatgctgtcacaaaaacatttattaatatgcaaattctaagtggcaatctggacccagtcgggttgtgctaatttgcacattaatatctgtcttcaggccggcctccgctctagggagggaggcagagggactggggatgaggacaggggagggaggacacataggtggggcagggtgtagaggggccctgttgggggcctgtggcttgtccagacaggggcgggcagggactgaagccagcctgcagcggaggaactggaaagcaccgagactcagcaggttcagaatgtaatgtagacacaggcctgggacactggcctggaggtcccctgggccatgttgggagccttgccaggaaagggactctgcagaagccttagcctatggagggtggtggtgtcaggaagcagagcaaagtgaaggtggtaggagaaataaatggggaacatcacgggtcacttcagctggccagagtggctactgtcatcccacttgccatcatgagctcctttactcatgagcagaatggctaaggagcccctcctgctttatctgctccttcttggaccaggacccattcttcacacaggtcacccagtgaggtggccagtcctgcctgtcccagagccacctgccctcctcagtggactcatatccctcattaaacttactaatgagtacggaaccatacgtctctgatttgctgggtcagtcctcattccaagccttttctccctttgtcctcataaatacacacttatatttgtcaggctgtgtgtctgatttttttgttaaggaaatgtgatcactaggctgggcgtggtggctcacgcctgtaatcccagcactttgggaggctgaggcgggtggatcacttgaggtcaggagttcgagaccagcctggccaacatggtgaaaccctatctctaccaaaaatataaaaaattagccgggtgtggtggcatgtgcctgtaatcccagctactccggaggctgaagcaggagaatctcgaatcgcttgaactcgggaggcggaggttgcagtgagtggagatcaaactgctgcactatagcctgggcaacagtgcaagactccatctcaaaaaaaaaaaaaaaaaagaaagaaagaaaagaaagaaaatgtgatcacctctaactagattaatgccgtggtggtggcaatgataggcatgtcaagggaagtaggggttgctactggctgtagtttctccccatcttagcttgtccatgccacctggttaatcaattagtcagtagtcaattaggccagtagttaactgagccaatgtctcccctcccctccacctcccccagcccacaataccctcttgcctactggctttattctaacctgattcattctgcaaaccctgccttgggcatggagccagccctccctgacctcctgtccagaatgctttttctatgatattgtgccacacacctacagttttgtttctctagtggtttcaagtgcgaatcctgttttcccatctacatgggagctctctgctccacagtacctggcagagaccccacatgtggactattttcaatatgtatttattgattttccaaagtactttcatcagttaacacattttaccttcatataagtctgtgaaatgacaaggctgttattttcagatactacactcatagtgctcaagtgtgacatttattgaaacttcaaaagtttagatttaagaattaatttaatccaaataaactaaacttgcaattctaaatatggccaccaggtggtggaatctaccttggtatattctttttgctttgggcatattacctggagatgatgaatgaatgtattgatttttctcactcttctgccaccttaatttgcctactcttatattccaggcacataccccgctgtccccctaaagaatgtctgctctgtggacctgcagatgtacaaagaggatgacaattattatgtgatgtgttgaaataaacagtgttctggaagcttagagaaaggaataattaactcaatgaagaggaagcctttacagaggtggcaacatcagaatgaggtaagtaaggaggaaataaggtgagagtggtggcttacagtggtaggaggctgagcgaggataccttgcggtcgtggggagagacgggaaggcagtgctgtgtggagaggccagcttgagggagaaccagcttgagggagaaccagctgatgggaatgaggagagtgaggcggagagccgtactgactcaaagactgtctagatgatggtgccattaactgagagtgagaacacacgcttccccactaattatccttagaaaaagtcaaaatagaacttttgattgaattaaattaacttgaacatggtgccattaaacgagattggaaagtcttctaaaacaagcctataaagaaaaaacacctaggtacaattcagtccctttctcaataatctttaactgttatggtcctaaatagtctctcttttcctaaatagtttcctctctagggtttcaaagaagaagcccttgactgcatgttcacctcttcactttgttctcatacctcagggtatgtacagagtggggctctgtgaattctcttagcattaaaaaggtgttattgtcttctgtaggacaagtttgtactctctctcagtgacctgaagaagaagccactggcaggcagaaatgatggactgtgcctctcactggtcctggggctctcttggcgatagagagacggcacgcacggggctgagcctgctgcgctgtggaggcggctccccagccccggctggcctcagtggaggatgtggggcttttgctttgatccttgcccatggtacagattctagcagtaagaagagacagatggcccccaagttcccctggttccttgtcctgggcattactttgtgctgccccttcctccctgccttttcccggcaaccagggccatcccgagtggggggctgggccaactgaaccccatggtgaagctgaacccatgcctctgggccaggccttgctccctccccaaaccagcagagcagcaaggggccctcacaacctgccctgggaccctggctggcttctgccttggtgggatgaggcctggatacccagaaccacacgcagccaactgcttccttgacctccagcgcccctcttctcacgggaggctgttgttcaatcctggagattcaggatccagggcccacctcgtgctgggcccagctgagtccggcttgccagtctccaccccgagaggactgaattcagttgcttcttccaactcctttggacaaacccagagtctcgatgtaaagttgaggactctggtctggggctttttctggcctcaggaggctggtggaagagtccagggctggctgaagctgcaggtttttccttgtaccctagcagcccttctgcgggtgggactttgttttgcagcatcctgagcagatcttcatgtcctgctttccagtctgaccctttgctccttccagctgtaatcccagtagatcttggtgctggcccacagcatccccaatcctggcgaaggagccaagggcagggagccccctgcactctctcatcagaacagaggaaagtagggcctcatctcacctggcctggggctgggggaagccagctttctccctagtattcatccagaccctcctccttcccaccagctgatgaggttctgtggccctctgtggcctttattgtcattgtccctgctttaatgccacactcggtggaaggcaggagttgggggaggggggagggtactgtacagcgcagtgtgatttgggtaaatcctttggggcaggtttcattgaggggagagaggagggatcacctgaggtgtgagaggggcttctctaaagggaaaaagaaaggtgaggctgaggtcttcaatgccaagctcagcacatctgtcaggcttggtcctaatggtgccagaagtcatgcaccattgcgtgaagagatggggtagggaatactgtcccttctccccaaacaggccacctgtggcctctgactgcactctgacgcttcctcctttcccagctcctcctctgtctccctctgccctttgcttctcctcttccctcccttccctcctccttctcctcctttcccccctccttctctctccttcttctctgtcttcctcctccagtctctcccatcctcctcctcttcctcctctccctccccaaggccagtggtgccctggccctggttaaacctggtgtcatgccctctctagctttcctgttgcatttctcggttactaatgagctcaagacagcagcaaacacccttctaggtctgctgctgtcattcattagcataatgggccatacgagaagtagttattgcaataagtgcggtggggagggagaagccaaaaagtccaacttacatgggagtagggggcctcccagagcctccacagaacatgctgaggatgcctcccgagcatgcccttccagtctaagccccgacaccctctgcttctgcctggagcacctcagcccttgtcaccctggaccctcttgtccaggagaccttttgcagtgccctgaagggtgacctgggccatgtcatccatcggttagttaccagggacttcctgggtgctcctgtgcacctcttgatggctctttctgaggcttccagtgaaggctctcggaggcaccacccagcacctcatgaacagactggggtcctgccctggtgaaacagggtgggagttagcccccaccccaagttcctgatggttggcttaaagtgagaagaaacacagaggaaatgaggggtcactatggttgagagttggagatgcacctgaaacatggagcaggcaccagaggctgctctcaggctgtcgctgtcttgctcagatgtgacgagatggggaccaggtggggcacggtgagacattcaaattactgataccaatctccttcaagcagcccagcccttccctgggcctccctagatcagatcagagtccacacccacagggcagccagtcgggctgccaagcactgcaggccaccggaatgtagggctcctaaaatttatggctagactttatgacaatggaaatatttttttaattgagccttgcaccaccattacactgctaatttaattattccctatatttcatccatcaccatctgatcttcaggaagcaaatagcttgtcttcttgacaagaaagcaccaaattgattaaaatgtgtgtgggaggggtgctgggctgtggtctgctcaccatggctggacctctgggtatgcttgggggaggtgggaagcatagaaaacaggacagatgtccactcccccgtgcacccacacacacccctgaggatggtcaccgcatcctgccctccctgcagcctcactgtcacactgagcgtcacacgtacaggagtgtgagcgtgcacacagtcagaaatttatagacacagcctccagtataccgcaaaatgctgcccccacccacactgaatctggcacataaagccatgcacagtgaatccaccctggtcacaaacacacacaggcacagagtcatgcacgactgtctcactcagggacactgtcaggaagcagtctggactcctcacgctcactcacgctgcacagatccttcagggatgggcccatggaatattctggggctccaggcttgcttctgtgcagggtttggggcctcagcctgttctgtctcacccaggagtgaaggcacagcagctctctgccagccagccctgttgggatggcccctctgcccctgctagctccaggatggcttctaggacaccttgtccacgccccctccccacatgctgtaggtggcatatgtccatgagcgtgcgccacatgggagcctgcagcgtgggttatggaggcgcctgaaggagtgtggctgcgtgtcgtgtcagtttctccacttgattcttcctctcggttccaggacgcccccgacagctcccagagccctggggatgagagaactgggagccacgtgtggcagcccccagcctgtcacttcggccatctcttggccatgccctggctgggatttcctagtagttttgtgcatgtgggtctcctcactccggctggagggtagctctttcagggcagttactggattttctcctctttttccctctgctgggcatgcagggctggctaaggcatggcctgttgactgcggcactcctactgtccaggtgatggtgagagcacctgtcatgtgctagggtggagggggcttggcaacagtgctggtgagcagaattaagctgggggcagggggctgggcagaaatctctggggagtaatcagtaaatacttactgactggctgactgagtgaatgggtggatgattaaagcagcagccagaacaagagccaagcatgggtggcacctgaaggtggactacctgctgaagagctgggtggacgggaaggctggtggtggtgatggggcggggagggggggcagtgctgctggccggcacagcagtggcagcactgctattagtcatcgtgaaagctccaggtgcccggtgcaggcccagcagacccctgacccagcctgatcaatcctaatggaatggagcagaggggcagccgctgcagggagcgggccacccgtcctccctcctgtccccgtccttgtaactttgtcagctgtcacagcagccctgaatgtggaggctgcctgcctcagtcatgtctggtctcgtttggccggcctgaggtgccaccagacaggagacgtagggaggagaggacagggatggaccccctggggaggggtccctaaatcacaacctgcaggtggcaagcataagaagcaggcagggagagaagcctcttggtgaaaggcccctgcctttagttcatatttgtctcctgagggggcagagggtcagggaccccaaaccttttcttaaccatctaggacacatggacacatgccccggcaaagctgcccctctctaaggagcagcacccttgcccgtgcctgcaggaatggaccctggcatcccttgcctaagcagctgtctgctctctgaagctctgcagcagtggcagcctgctctgctgggtctgaatgcaggctgggccctcctggctcaaggtagcacttgccaaggtcccatgtggtcgaacagtctttgtgctggagtggtcctgtcttccgggctgggcaccctccaccccatgtctctgtcattgccatgatctgttcatgtgtctatctcccccatcagaccatgccttcccttggttgtcttgatgtcctgacccatggcatggcgaccaggtcagggtccatgctcaataaatgctggctggtccacgtagtgaattctcgcctgaatcccctcagggccttgcatagagcttgttttctgattgtcagagaggatgccaccaagggcagatggcaggacactgagtgtctggggggagattcaggacacaagagaggcacagctaggataaggctccgagcagctcagaggctgcagtgagtgtgctctgcgcagacaggagcaggcagtcggcaccaggcgttttcagctgcggagtttcgcctgtcttaccccaccctgaaagcctggatccaaggcacaattggtcccagggtggcttttagtgtgcaaggctgagaaccagaggggtaaaccataatgcctgcaactgggtcaccagaaccgaattcagggagaccctgggggctgagagcctctgctcccttccacttctgtgacgatgactcagcttcacacacccatatctgctcatcactgtggtgggggaagtgggagaaagaaaggttttcccccaagaacaagctagttctggggaagagctgtgagctggtgagctggggctaggacaggctccgtcacggagagaagacctagttgcaccccagggtacctccatgaaagccacccacagccatccccatttttagcttgcgttgctctgtgcttgcactgggccatctgttttgcataaggggcaacccccgaaagcactgttgaaccctccatgtttaggtgcacagcttgtgaaagaagatgtggtgaagcctcttgcttagtgctcctcacactggatctgaccgctgaccactcggatgaactagaaacccagagctgagaggagcggggaagaggcagcgctcactgcaaggccatgctctgccttccctccaacaacaggctgtttccttcacctccaaagttcctttgtgcccacaagcaaagtagagatgctacctagtgcagtatggcagcactccctagcagaccatttaattcctggtccccaaagcattggacccaaatgcttaaaaaagcattctgcaattcacaaactcagatggattttgtttgttgtagaaagaaactagcctgttgtgctactgagcatgcttcagtggtccctcaggtctcagctcaaagtcacctcagtaggggcttccctgacaccacatctcaaacagccccttccctttcccccgtcatctgcttcatcctcttcaaagctcttatcagcgcctacattgatattgtttatcggtagattatctcccttctcccatgtcattccattccaagggggcagattttatttttgtctgttccctgtggtgccccatgcccagcatggggcctgacaccagcatatgcctaggcatagtgtgttgcacagacacagggactgcggtgtgttagagagacacagggactgcggtgtgttagagagacacagggactgcggtgtgttggacacacacatggattgcagggacagggtacaggcttgaggagatggcttggttcctctcggggataccctgatgccctcctgctacctcctggtcaaggggtgcccagcttggcctggcacccagtggggaagacccaccccagatacagacctcctgatgggatgtacctggcacttgctcaaagccactcagagccatggaaacagggcatggggtaaatttacacaaaggggtcattcattcgttgttctccagggcactggctggggcccaactttcaccctcaggaggggctgctcaggaacttgtggacggggtggctcaggttttcaagaagcagccctttggacacttgggcccaggtctgggtgggcaaagctgggtttgggctgcctggagtcctgcagggaactcattgctcacagagggagggctctgccagcagcctgcagccccacatcccccgaggggaccaagtcccacagaggcatgtggtggggagaggaggtgtgggctacactgggtggggctggcttttggagttgggacttggtgctccagccccggtacctgagtctctcttggtgacaggtgcccatctaggcagattccttcaccttttaactaacaacccatccccaatctgagcaatctctgaaggtgcggagcacacttgacagcgacaaatgctacactcaaatgaaattaagtgatattcctttacgcggcttttttttttttttttaattttaagcaacaccaataattccaactgcaaaggctaagggaaaaaaaaaaaggcaaaaacaccccacctcctccgagcggagcgccagaggtcggctctgggatttgcatgacaaaagcactctacaaacaacaacaaattgccagcttgtcgggggccgcagggcgcgcgcgacaactggcgcgttcctctgggcggcgctgggctccgagacccgcgggaggggcccgcggcagatgctcggggaccggcccgacgggggcggggcagcggggttccggcctccatagcaaccgagctgtgaccatggccagagagatggctcggcagccgccacctcccactctggacaggcgcgaggggcggggcggagggcgcgggcagcgcagagcagggagagggacgcggggcgggaggcaggaagctgggggacggaattgggcggcttctcccctcctgctcgcgtgcagccgccgtgaccttagacctggccggcgtccacgggcataccatgcgggcaccaggcaggccgtgagctgcccttggtccagcagccgggcctccttctggccgcgcgtgcttcctggctgggctgggaggtggagcgtgtgatgaggcagcggccggctcccccaaagtgaggcccaggcagatggctggccagagctaaattgattcctaatgatttgtgtctctcccctgcccggcaacgggtaacttttcattagagacacagatgtcttcataaggcgatgccagggccctcccacgacagccccagcacccctccactccactgcagacatggggggtgtcacacgggtgagaaggtgggaggactgaagggtccagaaggaggcctgccacacccagcagtctgctgtctccaggatgcaagtgtcagccacccactccccccagaccagggcagctcctgacctgctcttgcagtggccactggggccacctcctaggccctaggctgtgtgggtgctccagcatcactccctccctggcaggcctgtctggtggccatcactccacagccttcctgccatgcccaagacccgccccccaccccccacccggcctccactcactgtccccagagtaagtctgccacccacccctgcagatccaagtctcacctgtccactgccaaccttcaaattctgtccaaggcccgtggccatgggtttcccatatcttcctgggcttcgaccactatttctgtctacatatcccctcaccatgtcacctcgtctatgccatgttcactgtctccctggcagagccttagtggacagggaggcagaggctcactttctcctgcagtcatgttgcacttctcctgtggcacttacaacccacggtcctggtgagaatgctttttttgtgtgcttcccccaccatttcctcctgcactacttcatttggtgggtgatgactgctcccacggcgggctgggctgtgtgttaaaggccagacacgttccctcctctcccttccaggctcttgcaagctgcagtctgagctgacccctctgtatcctccccgttcctgcgccgcacacttcatgcatagcaggtgctcactggagatttaggggaagggaaccacagtatcttggtgtccactatagcagtttgtcattttgagatcagtagttctctctgggatcctcttgtaaaacactaagcccctgaggggtcaggtgagtgaggggtggatgctagggtccccatctcacagagagaatctgtcatcttgtttcttgcctgggggcacgactctgtcaagtggtagaggcgctgaagtccaatccaattgacctcttggttgttgggggccagcctggcttgccaggtgctgagaactccaaatagcacacacaattaccagacccagtcctgaggcccccacatggcagccagaggagaaaggaggctggctttggggcactcagctccccatggtgtgaactccccagcctgggatccaaggccctcccagccccatccagctagactgatccatctaactcccgtgctctaagccacacctgctctcttcttgctcggctcccttcatggaccctggcaattttgtctcactcactcctccttggcatctttggtcttcataggtccccccttctgatactctccccattcttgcctgtctaggtaaatccaacccatggtccccgaccagattaaggattctgtctagtctgtgggttctttctctctgtccataagtacaagactgcaagaagactctgacttgtcacatttctctcaggactcagcaaagatgcatttggatgtgctagtggatgtgaggttgcaagtacctctgcctgccttgccaacagccacacgccactgtggcccctggcctcagtgctcttgtgcagcctgtgaccacacagcacatgctacagagcttgaacaatgtgttgctgcaagatgggagatccaaattcttgtcctagctgtgctgccctttttccatctgtaaatttttggctattgaaaacatgtctcaagatggtagatgggaataggttttcagaaggattaaaaacagacaaacagaaacaaataaaagaccacggtgagtgagtcagggataaaagctgatgaggtgagccgctgtgagagcaaggtgtttccattgctcacagctgtgtcctctgcactaagcttggtacatagtaggtgctcagtaagccctggttgagtgaatgcagctgcacggtcttgccagtgtccttataagagacagcatggatgaggcgggtgactggagaaaactaggatcactctgagtctatgattggggtcagtctgggataggagatttggattctttcccccacaccttgtagggtgtgaacccatgacctcagtctcagtgaccgcacagccaagccaccacgtgtgttcctcccagacagccctcctagaggaagccaagaacctatcctttgtacctccccagcatgtttgaggcaaactcaccctgctcatatcttttgtttttcttaattaaaggagcaagagccaggattccgtctctgagggtgcaggcttgtgtctggatgtcttcattttggccaagctattggtgtgcctgcctgtgtggcagctggacactgggcctccagagcccaggggggaggtgagcggatggcggctcagcccatgtcactgcctttgtcacccccagctccccacaaaccctcatgcctcccagacattataaggactgctgctgtcctctctgcagacacaaagcagctgttcagtgcttggttctgcctctcgactccctgaactccttgcggtgcttgcacaaccagcccctcaccctccatttaaagagatgctttcatgcacagggcatcttggcagacctcatttattcagggagatttgccaggccctgtggtaggcctggggcttggggccaggctagacaaagccatgatccctgccccccaggagtttccattctaaactgcagctgggctgggcaagggcaggaccatctgggttgccctgggtacccaggaccatctgggtagctccaggctttggttttctcatctgcagattgaagggattggttgggatccctaaactgcatggaggagtcctggggagtccatgggtggggagggatggaggctgggcaggctgggctctgagctactcctggccacttcctctacagctgcacaagtcatgctgcccagaaaccaggcccagggtgggcaaaccatgcctgacggatgaccagctcctggcttatggcacactgtatatttgtaagtagcactggctgtacatgaagcttgtgaggtgggtatgttggctttttatcagagaagtccagtctcagctggggtagagtggagctggggctcgaacccaaatctctgaatctgagctctgtacctcccaggaattccatccccagaccctgggtggagtgggcgggggcaagggggtgcggatccttggatgtgctttgttccaacacaaggtcatctctgctctttccagcaggggctcctctcaccctctatcctgacgatagggctgcctcctccctctggtctctccccactcaggcccgggtcagtggcaacagctgtggcagtggggctgtaaaggggccctgagcccatccggaatgtgaagggcaggtccttcagggaggacaggtgtgtcaagtgagctgccggcccttgctgttgggagagagtgaaggaggcagaagagcttttatagcctgtgaccccttcccccattccctttcaataatagtccaggccaaattacttccttctctaaagttctggagtttggagtcagaagggagagggggctggaaaagtgggcaaacgagggccaggatgacagtgaaagtcctgtcctgggagggtaggtttcgggagcagaactgttctattgtggacaatgacctttagagagaaggaatctcccttcgtggactgtgcctcacagacatagctgctccatgatgtggttctggcacgtgagggaccttgaggagcagacatcctgctgatcttgaggaagatcctagcctcggggcagtgggaggaggcttcctgctgtggcccaggagtgaggccactggcccgtcaaaggggccttctgctgagacataaggctgcagcccatccctccatctcaccctcctccctggcccacagaggtcctcccaaggaggcctgttggtgaaagggccagggacacgtaccagccactgacactgcttgaggcctctggcctttgtttctctccaaggcgtgggggttccggagagtggtggagcttagcaggcagggcactgtgttgcgatcactcgagatcgcaccatggacccagccaccttggacaaatcccttctcctgccaagtcctaggttcttcaactgtaagatggaggtggctacatcccctcgagtggctgagaggatttacagagatcccgggggtgcatatagatttcaaactgcccatgcttcacacgtgactgctttgtcctgccaattgtcttcccacctgtgggtgaggcctgcccactgcttctcagtctaggaaacccctttcaggtcagcatttctattgtagtaggcactgtgccaaatgatagggcgcccaaggtgaataacgcacaggagatgctcacagtcgttttttgttcagaaatacttgttgatcactgctgtggtttgaatgtttgtccccttcaaaactcatactgaaaatttaattgccattgtgatattaagggatgggacatttaagaggtgattaggtcatgaggggtctgtcatggtgaatggattgatgccgttatcattagaatgttcccgtgagagtgggttcctgataaaaagaatgagtttgccccccttttttctctctgcctcatgcacttgtgtccccttctgtttttcctccttgggtgcagtaagaaagccctcaacagatgctggctccatgcccttggacttctcagcctctccactgtaagccaaataaggctctattatttataaattacccactctcaggtattctgttatagcagcaaaaaatggactacgacaatcaccaacacaatgcctggtatcctgtgggggcttttactaacaggctgaacaacagtcgctctagaagggtccaaataacagaaacacaaagtgcctgagatacacccaccagttgtccactaaccagggttggtttgtaacagctgcacacctgtagtacaggaccttgcctagacttggaggcaggcaggcaaaaatggttggttcacgtggcaggtgagcctactgtggtcctgattcagtaagacgcttgcccatctaactagctatgtgaccttgggcaaatcaattcagttattttggctccaatttccctaagcacatcctttccagggtctgctctggctcaatcattccttgatgtttcgcttctcacccaggcagatgagcctcactgatttaggtccactgggagaatagatgctgagggaaaggcaaatcccggaggcaaactgatgagattgttggttttatgtattaccttggctaggctgtagcatgcatcttatttaatcaaacacaaatctaggtgtacagtctacatctaccagtatttgccttgaagtaaaaggagggtatacaggtggacctcatccaatcagttgaaaggccttaaaagcaaaactgaggtttctttgaggaagaagaaattctgcctcaagactgcagcttcaactcatgcctgagagtttctagcttgctgctctgccctatagatttcagacttgccagtgcccccacaatcacatgtgccaattccttctaataaacctttatatatgtgtgtatatatgtatatgtgtgtgtatgtatatatatgtatgcatgtacacacacacatatacatacacatgtgcacacacacgtgtatatagcttctatttctctggagaagcctgactgacacacctgggctcaagaatatctccaaagaaatgtgtttgttgcattcatgttctttcagcaaatactacttagaaacagatcagagggccaattccagtaaacggagaagaatcattggtagttaggtccatccgttggtcttcaaaccatatattggagcacttaaaatacattctcttcttcttcattgaaccaactgcccagtccagcttcccacaccaggctttgtgttctcaacccagcctgcccacagtattcacaaaggcaagctggattctgtcatcccagacccagaatgaatgccgttcatgggaatctctagtttttgagaaatttgactggtgtctattttactcttatgagcagatgatgttctttgtttatgagagaaattaggccaaatccgagttttccacagatggagacgcctgaattattgattagaggctcatgaattgggttctggcaaatgacagggctgagggcggctgatttgtgtgtcactatgggaacagcttgatcccagcggggcctgggcccttctgatgcagtgttgggcctggcaggggccctgggggctggctctgagaatagagtaggtgtgggggtccttccttggctgcttctgctgggctctactggttcccagagagctgtgaggcagggcctagatgggggcctggactggcagctgggatgaatgctcaggctccagtgactcctctgctggacccccagatggttgtaggtaggtcttcttcactcagaaaagaaagcgacggacatggagatgttcattgcaacttcccttctcccaccaggtcatcctctcctttaaaattgaactgcaaggccagctgatgaaacctttcatgtggttggctgtgtctggcagctcagcaagcacctactgtgtggaggccctgtcctgggctcctgatgagcaacactgcttcatggaagaggcagtgagctctgcatttgtggggcaaggactcaggaaagtgcctttcagagtgtgatccggccatcttacagaccaatactaactgaaggtcactgagcacaggtcaagggctgtccatgcattaaatcatttggtcctcagaacagccttatgagccagttctcttgagagtgcaaccaagacacagaaacatccaggagcttgcctaagacttcccagcctgtgagccacagagcccagctcaggcaatgttctaccactccatgacatggatctgagacttccctgacaccagccatgagccagaaatccttcagcctttagctaatagttgaatggggagatagacaaggacaccatccagcgttcttcccaccaaagcatacttacacagggctggcctctcacttccctaggggctgcaaggttactcggctcaagaaagggatattgcatttcaagccctgagttggcttgacctggggcctggcatgatccataaggaggcctgggccagaccccaggtcttcctgcctattcaggtgcatcactctctggttatagcccactgtctccttggggctgtctgcctttaaaacctaacgttgagtatgccatcagtttgctggggagttgggacaaatcactgcagctctctgggcctccaactccctcacttgaaacccaggcatctggactctacctctgggcttccttccttttttatttctgaggccacctggaggggatgtgccccttctcatgctgaggcggtgaatacatgatccgctggggatgagcagggaggctgctgaggtgaatccataagtgtttggtctgaaccactttaatttgcattccagtttaattaccatccgtctttcaggttgcccacatgggagaagaggcattggggccccaaggatgctcgctcttgctcctaaacgctcctattgcacctgcctggaacatataccactgctcacctccatggacctatctgtttccagggttccagggtcagggggaccccagggagctgccccttctctaacccctttgagcctgggtggacccccctcttcttgtccttgtgttctgagtgggagccccttctcaatccttctagcttggaggtggcaggtggaaagtaggtgtggggtagggtgagggtagaagctctttgtcattctttattccagcaaagagccagagtctgaatgtggaaaaggtgaaagagaaagacaaaaagtaagccaaagagtaagtaaaagttcaagccaaaaggaacttttgaaattcaaaaagatctttctccccccataacagagcttcccaccttgtccacacctagcttactctgccctggggactggccagggctgttccttctcttctgggcagccctgtgcccttccacagcctaacaagttcaaggttcctgcaggcctagctcaaggacccctcttctgaggagccttccctgggcccttctcccccagccttcctctgccctccccaccctccatgcatggcctgaacaggccccagtcctggcatgcacagggccccatgtggcttcttgtggctccgtgggggtggcatcttttccctcactgggcaggctctccagccccaggaaggagggctgggaggaagggaaggaggaggtggcaaagatgcctaatctgagacagtgagagtgaggggagagatggggcgaggaggggagacaggcagagagagaaggaagagggctggggttgggggagggcgggccagccagcagtcctcattggactaaacacagtcccgggacagcacataattcgggcctgagtcagcaagtttcgcctataatttcttaagcatctgtcaggccactgtctccctgcccccctccataagaggagcagccgcttcaaagggagcctgggagcgaaagcctcatttagcaaatgaggggaatgtttaaaaataacacaaggagtcaccctccatggaggcgaggccacccctcccctgtggctctctgtgctcctcctccagtcacacaaggcccacagggagggctggggacaaatggctggagtggagggacagggccatgtgactccatgtttgcatgtgactccgtgtgacagcatgtggcgagggggtggtgggtgtgtgtgctggcaggggcccgggttgctgtgcggcctggcccagctgtgcctgacggtgtgcagtcctctagaggtggggctgagagggcgtgggacaggcaggacagcgcaggtgtgtgttcccctttgcagaagggcggccctaggcagaagcgtgagtgatacgtgtcggagtttacatagcgcacatgaaatgatgtgtgcaggctcatgcagatgctgtggctgggacagagccactgggcctcctgggctagtgctgctcataccctcttctgagatggtctcagctacacagactcccctggatttagccctaattctcattcctattctcagaggtccacttccttacctcagggctctcagtgcccatggctggctttggcatggctttgccccccgctgtgaggccatctgtccaggaggcactcagggtgctttacagtcagcatcttccacctgaagtgggatctttgaccaccattcccggattcccctctggggcccggccaggccttcacatgccttgtcacagttactcctcaaacagccccatgggcaggcctgagccagcaagttcattaaccctacattatagacaagacagctacaacttggagaggttgaggcacgtgacctcgagcacatcccccaacccctgaagctcctgctcagctcatgcccggttcttgaacccaaagggaagcagaaggtctcagtcacatagtggaggagttctctggtctccagactacaccccacagaagaggaggccccccatttccaaatcctggagtgccttcatgcagggcacctctggagttaagtgtttgttttcagcttattaactcactggcaaagtggtggagtaggatctggggcatagacacagggcagggaacttggaaaacaggagtccaggccctgcctgatggggcaagtgcacagttggatgcccagggccctcccgaagccatgggaatctcacatgggggctgtgcctgggcctggacatcactccagccaggcccacctggctcgacctgctccagcactctcaccccatacactttggttcttggggagctcggctcacagaggattcagaggcaccccaagaaagcagagagccaggatggagagtgtacaccttgtgaccaagaccagtgtggaggtgtggctgccctaacagtgaggtccaaggcactcagaaagcccctccttctagcatcttccttgttaatctgctctggaggctggcatgccaccattagcactcattttggggttaagcactgcccatcccttgtcgcatgcttttccttgcctcagcattcttattagttctgtcccaccctctaaaatgtctttgctatttgtcccaccaaacaaacattccttgtaaaaaaacaaaacaaaacaaaaaaaagtccatcatacacctgcacccagccgttcacccacggggccactctctgctctgagctggctgggcttgggcctgaaagcaggccccaaccccccccgtgtcctttccttcagattcctggttcctccagctattcctcataggacatgttttccagacacttcttccacgttgtcatcctgtcattttcactaacagctgaatgtctagtcatttggcagtgttgtccacaggtcccatggaattgggcctccctgtgtgggaggaatttcctcaggcaggggcatgatccacagggatgatcacatctcccccaccctcctgcccttgccccttcctctgctagttcagatctctgcacccaaggtgtgctctgctcagtctcaggactgggtaaccatcccgccacctctgcccagttctttctctgtggtgtacacgccacttcctgcctctacccttccttcgaagaggggctctgccccgggatgcaggagactgagaagatttagagaactagcagagagatgtgtacaccttaccaacaaggccagcaaggcccatctttgtgttccaaaatgcaggggaagccttctctctataaccatcatttaattcatttataaaataggcctttagctcaacaccagagggtccctaagattgctttcagttttaagaacctgtggctatgttcttcccgctaaaagcaggagtcccctctctacctgttgagggaagagggcggtgggctttggctgtggagggagagtgcctgtgagatattagtgggggaggtcccattgtctctgtctgtccccttcacacatcatttccatcacttcaggccaggcatggggtggtggtggggggctgggctggcccccctccagccgggagtggaaaaatccatcacgaacctaacatatattttaaaataacttacatgcataacacccccacgctcccatttctgagcctcagatctgattatctgcagctctctttctctctctcttttttaataaaaaattgctataaatctttttgtcacagaagatagaagacgcaggttcgctggagaaactgcctcgctgagttgtttcatagggtgtttggtgccctgctccatttttatttttttttaaactcccctgcagcccaaactgaatttcaaaaatatgaggagtaaaggaaagctgtccctggttggctttaaaggaggcaaagcagtcagtagagatgggatgacacacccatcccatctctatcctcggagccccacacatgcaccccagttcagtttggtcagtgggactgcagaagagggaggagagattccccagcataagcccacaggatagctcactaaaaacatgccttctacgggaaaggtctctctgcctcccacatacgtccctatccatctggtttaggctgacggtcctgcgctatgggcttgctggaatggaaaagagggtgaatgtgctgctggaccttgggggaacctgagcagtgcggccagtgaggacctgcatgataaatcatctacagatagacaacttggagggtggccttttgctgagcaactgttgtcccaatatacctgacccatttgttacccaagcacaaagcacattgaaagaagaaaatattttcctggttgctccattgtgggccagggttgaagaaaaggaaaacccctaatgttgcctgttatatgcagcctttgagtgcagggccctgtactcatcagatgctcagcagctagacctcagggaatagaagttgggtagggcaggtagaggaattggacctttggaagaaagccaggaaaggtattatggggttgtggggaagtgggggaatggggaaagccaggaattcaaggtgggcctgtctaggagcgggtgaaggagaccagtctgaacaaaatggaacgtctgggagagctgctgatgtgtctatcatccatccaagcaaaggtggaaggtcagacctcactttgttagacctcaggaaagacagcatggtttattgaaaaaagaaaacaaaccttaggatctaatagacctactgcttactcttctttggacctgggccagtttccttacatctttgtgcctcactttcctcccttacaagacagagaggatgatattatctgcagaactgctatgggggttaaaggcaccagtgtacataaagttgggcacacgggaaactctccgaaaacattgtccctacccaacaacatcactccagggagagggctgctggatatttactccagttcctgccaagctctttttagaatgaggcaggttttgccagcccagcatgagtgagcagacatggcacctgcctggccattcctgggtcccatcacttcatgggctgttgctggatgagacaaattttatctgtgtttaataaagtccagtagtgtggcagcttatgaatcacagtgtaacacaagagaatggataccagataaatatgtgtgtgtgcatgtgtacaggtgtgtacatgtgtgtatatatgtatgtatatgtgtatatatatgtgtgtgtatgtgtgtgggtatatgtgtatatatatacacacatatacccacacacatacatacaaacgcacacgttaggatgttcaggcattaataacaataaatattgttattaacctggttcacagcctgcagtctggtttaatatacgaagtgaaatggcaggtctgcatctgtccttccctcccctgctccttgccttctgtctgctctccaggacaacactgcacatgccatattggattccattctggtcctattcggataagcaggagattaaataatgaatgagatttccattagctcaatttttggggggcatatttcaggcaaccttttccttttttaatcaaatctgctctgtaccacagaatatttttacattgattttgggaaaaaaaaggatttttaaaaggactggttaaaccgcaacactgtgtgtaccgaaatttggctggcacagaatactagtgaggagaagcggctgggatgcagctggaaggcagaaagtggaatttggaatagctctgaatcactggatgctagctctgtctacctttcctctttcccacctcaccgccctcctctctcccatgccagggtctcctgctcttagactgatgggctggggaagacaagtggctcctttgttcttattagtaagcaggattatttattaaaattctatatccatgataggaattatgagcaaggtacccatccttcaggaagcctccttctttgagttgaggctactgtctttctcttaggaagaccctgaaccatatctttcaaaggactgcaagggaccaagcacccaactttccaggaacgtaagaatctgctgtttctcagctaccctgactacacacatggaaaaatcaagaaggtttttttttttttttccccctttggttggtgccgggggggggcgcggtgcaggaggatgtgagaggaggaagcctggagattccatacaagtctggcaaatctgaaggcctcatcacacttcactttatgattcttcccgtttcctagaattggaggcagagttgggaagacccagttctcggctcctttccccttggctcttctcagaatttcacagctgccctttgttgagtcccagccacagctcctaagtctgagagtctggattcaggctggggacacccggcgcaccctcccccgaacacgggcttctctttttggtcctgtcccaccacccagctcttcagggtacaggtatcgccgcctgctccgtggtgtgtgggggtgtttgtctccctctccacctgcccacctctctcctagctctggtcttaggaagcacagatgccatgtcctagtcctgcatgggtccctttccagacagcaggcagaaaggtctgtcaattcatcatgggatcccccgcaccgggtgcttagaacgtatgggttgactgaatgactccaaatgaaggctcagggtgtgggggcaggggccaggactgctgactgtcctcagatacccaaagggtggccatgcggaagaaaccctgagcctgacctacatactcatgtgctgggaaatgtggctctccctggcgatttgatttcccacatgaataaacactttcccaccagctttctgggaggactgaccaaaacctggaatgggtttggtgcctcttgcccttttgatgactggcctgagaactaggagccagggggcagccaatggggagggccccctcaggatgtgatgcactgcttcctactgaggggcaaactcaccatgtttgagctaggaggaatcttgggggtattgcagtcccccaaggatgcctcattgtgggggagggttgggcagacagttactgcagaggaggttgctgtgttttgggacaccccttgctgtaagcacgctcttcactgagctgaaatctgtctgctcatcccttgtgtatctggtttactctacgctattctgaaaagtgggtaggcagaccctagcctgcaccctgttgtcgaggtccagaaagccaagtgtggggggctgcatcagggaagggagtgtccagagtgagggagaccctggcggggggtgaagagaatgggtgacagaacctggcaggtgacaaagacaggagggggagctgagggacatggtagggaggggacagaagtgtcaggactctgggtctatacttgagacctagcaaggggacagggctctgtttacagatgggtttcttgctttaggtttcatgctttacctgcccaggcccaaccacctgccattctgccattctgggctccctggggcactgcagacagagtttgctttacaaagtgacccttcacatgcagcgcctcagggccaggcacacccactgggcccagcctgaaagctcttctctctcaggaattttggttggctgctaatattgggatgagaaaggccaatgagaatgatggaggcggagacggcctcagggccactttcaggtgttgactggactgagcggctgccactccccgtgccgatgtgtgtgaggttctcgggagagcatgacaggaaaaggacagaaagaggagaagagcaaagctggactctccctacccccgcccctgcctccctggcagcctaggcttacacaatccctggctcctgttccaggcccaattaatctactctctcccctgtctccttccttctctgctcctgaagacaaggaaaggagagtgtgcccttttggctgatgcctctgctgaattatttgagagatgagactttaaatggatgtttaaagggccagaggcctgggcctccactcctgggcacatgaaggtccagggctgcaggccagtgtgggcacgctgtcccccggcccacccactccacacctgggctaccagaacctcgggctggcaaacccgacgatagggcttgacatcatgcctgtgtgttcgtgtgtgcgtgtgggcatccctgcacacgctgtgccagccaccttcagtgtgcatgctggtgagagctgtctctgcacataggccatctacgcttttggcgtgtgtgttggggtagacggatgtggcatgtgaaggtgagagtgtgcccagcaatcgcatattgtatgcctgtgtgcatgtatgaccaagtgacttagggtgcgtgagtcagcctgcacacccccgtcaccgcagatgcaaggagggcacacaagcagcctgaggtggacatgtgcctgtaaaatcccctgccagggctgggctgctgttggcctcaaggcctgaagtggaaatgaatggtccagctgccctgcaggggcactgctcccttgatcctggagttctgcatccgtgagatccagagatggggagaggcactacttcccaaaggcagaaaccaagagtttttttgagacgaggtctcactctgtcacccaggctggagtgaagtggcactatcatagctcactgtagcctcaaactcctgggctcacgagatcctcccacctcagcctcctgagtagctgggactacaggtgtgtgccaccatgcccgggtaatttttgtatttttttgtagagacgggtctcactatgtgcccaagctggcctcaaactcctgagctcaagtgatcctcccaccttggcctcccaaagtgttgggattacagatataagccactatacccagcccaaatagcctgatttttaagggaagagttttgaaatttattcagagttcagaagtctcgaagagagggaaagcccatcccaatgtgtgggagacgtgtgtgtttatgtgggcatgtggctgcattgttgaggctgtgtgagggtgagggaacatggtcccacattagccagtggcacctggtcccatgggtatctgtgtatgtgtgtgtgcatggcaagaaaaatagggtctggctttgaccaaaccatctccaggaggtgaggccatggggtgacttattcatgaggggcactgctgctacttgcttctcactttctgatgggtgaagaacgttaggtattaactggcatttaaaacacacaagatacctaaaatcctacagaatccaccaagtccagcctaatcaaagttccctgaaacccagagagcagccagcaccaggcagggctctccccaggcttcagagatgggcagctcagcagcttatcgagaagggcagtggcaggcaggagatgaggcgggctgcatggggaagtggtgcagctccctgctagcctagataggccctctcaaggcctagttcagctgtgccaactgtgcctccctcccagccaggacccgtgtccaggggctcctagccactgtttctcctgcaggagggtaactgtgccctccagccgcctggcataccaaaagcaaggtcatctccctatccacctcttccatggagcagatcctgaccactcagcacccttttctttgctgtggtgttttctttattttcttccctccttcatgctgggggatgaggaagaatacaaccacataagacctctgagtcagccgtccagatttgaatttaacccattcaagtttgccaaagattcacagagtacctactgtggcttaggagccgaatgtccattgctggacaaaacagatatgataccttctgttgcagaacttccagcccagagacggagactgcttatggcatgttataaaccagagtgtctggtgctgtctgaggatacagagggtacagctggggttcaatgagaaacacatcttatcccaataagagtggagattccagggggcagagacagcatgtttcttcttgccctcacctccacagtccttagtccaggcctgaattttcacagaatatagatggatggatggatgcatgcatgcatgggtggatgggtgagcagatggatgcatgcatgggtggatagatggatggatggatggatgcatgcatgcatgtgtgtatggatgggtgggtgcatgggtgcatgtgtgtatgaatgggtgaatggttgagtggacgggtacgtgtgtgtggatgggtgggtgggtggatggatgggtgcatgtgtgtatgaatgggtgaatggatggatagatgagtgcatgtgtgtatggacgggtgaatgaatggatgttacttctgcatcacactctgctctcttagctttggaaattttggttggctgctaatattgggatgagaaaggccaatgagaatgatggaggcagagatggcctcagggccactttcaggtgttgactggactgagcggctgccactccccgcgccaatgtgtgtgaggttctcagttgttctcggtgtgaggttggttggtgaattgggtcagaactcagtgctgagtagtagtaatgatactcactgcctgctcatggcttatagaaggctgcgggggctgggcagaggggctcccctccccgcccaggctgtgcacacacattattggctcgctcttcaatcatgcctttccagctagctgctcctgtcacagcacatcttgttagccctggaggctcaatgaaatggaaattcatgtttaaatttaaaaacaacatattgaccctgggagccagcgatgtctacatttttaataacttactcagaatgaaggcttggatgagtatgcctgtttcttcatgtctgtgtgtctgcgtgtgttcacgtgtgggtggacatgtgtgttttaaggggtgcatttctgcgtttgttcatgtgggttcctgtaggtgtgttcacctatgtcggtgagcatctgtgtgtgtagggggtggtggaatgtcagcatttgctctggagctccgtggttaaggctgtgtaagggtatgttgtggggcatgttggaaaggttttgatttgattggggtgtgtttgtacagagggcctgaaaacaggccacacaggaaatgagacaatttttgttcccactcctccatgccctccactcctgtgacatgtattttgggcatcgcctgttctacagttcctctttagtctggtctcctaatccagatgaccccatggaccagttatggaaaaaatctcagtcaactgaagctggttgagtcctgagagggcacctcatcctctttcatttcttggcagaatcagaattaaccacttgacagtgctttttacttggtcaagtcccacatccttccagagccccattcctcctctccaaggagcctatcatcctcccttatgtgcagtgccctctggtgtgaaggaagaactgcaatatggtggtctggagacccaggatcttgcccttccaacctgctgtatagttgagcaaaatgtctatactctctgtaccataagtctcctttgtagggtgaggggccacattaaggcctccaaaaggcccatcttaagggtctgtcaactgtgatgtcatgatctccactctccaacccagtctgatcaccatcatcctgttctaagcactctcagtgtcaagtcattgacacttcctttctgctttccaacctgacatagcagagataaccatgaaggcagggcagggattcggcaaacacttgctcattgactgaaaacagtataatgccagtttcaagtttcttatttttccattcattcatctatctatctatctatctatctatctatctatctatctatctatctatctatccatccattcatacttgcatacatgcctccatctacccatttactcttccactcacccatctacccacctacccattcattctttcatccatccatctatctacccatccacctatccatctacgcatgtatactctttcacccacccattcactcacacccacttacccatccattcatccacctatccaactatctactcacccattcttctatctatccatctacccatctactcattttttttcttttcttttcttttttttttttttttgagacggagtcttgctctgtcacccaggctggagtgcagtggcgcgatctcggctgcaagctctgcctcccaggttcatgccattctcctgcctcagcctcccgagtagctgggactacaggcagccaccaccgtgcccggctaattttttgcatttttagtagagatggggtttcaccgtgttagccaggatggtctcaatctcctgacctcgtgatccacccacctcggcctcccaaagtgctgggattacaggtgtgagccacaaagcccggccctaattcatccatccatccagcattcatccactcatccatctacccatccactcatccatctacccatccactcatccaccaccgatccacccacctactcatctatctatccatctccccactcatccaccagtggactcattctacaaatatttctcctttcttattgtactcaaagatgtagaagacaacttccattcttgagatgcttgcagtctactagggaagatggtatgtggaaagcagtgtaagaggtatgtgtaagagtgggccagggtgctctggggagatgtggagtaggagaaaatatgtctgtcaggcaggatcaggaaaggtttcatgaagcaagtggtggctgaactgagcccagagtgctggttgggtcagatggagaagggaagagacatggagggtgaacaggagggcaggggccctctctgtggtggccacatggaaggcatgtttagagaatagtgaacctgctgacctggctggtgtagggtgtgatagtggagaaaatccagcctagctatctattagtggcctagaacactttctttcccatcacctcacaattacatcatgacacccaggagaaaagcagggaggcaccccttgtttagagattggagacttagcccaggatggttgagtactggctcaaagtcacgcagcaactttgtggtaaagtggggatcatacccaagtttctgaataccttgaactcaggtttttttccccccaatgatgggagaaagtgcccatctagaaaggtttttggaagtcttctttttttaactttaagagaagtggaaaatggtcttcaagcactttgtttttattacctattgaaatttgacataatgccttggcagttcccccttaatattctgctgtatatggagcctgacgatttctaccatcgaatgtggcaggttgggaagattaaaaagaggagctaaactagcagtagttggagatgaggaaaagtagcacatttatgaataatttcagctgaatcctcacaacatgacactccctggacagaacacattcattatcttattcaccacgactactgcaatattagtgatttgttactgaatcaattattaattcatacaggagaacgaggctctgtcacttaactcttctctgaatgttgggcccagggtggggcagggaggaggaagggtcagatttaaccttcattctctttggtatctttcagaaggtggcaaaacagcaaagggtggtggaaagtggaagagcgagaggtttggggagcatctcgtgccacttagagccctggcctgaaaccatagacaccaaatacacagggcaaggcagagcccagtggtcccttggggccatttgaggtcatccatccatccatccgtccatccatccatccacccatccatccattcatctatccatccatccatccatccaatatattgcctgccatttgaagtatctgactcaaataatttgctcttgcctgtaatcctcccttctttgacaacccatgcagatcctccccctgtcagaacccagctcctgggtttcacctccaggagccccagcttttctaagcctctagcttccatcctggaaatctctagtccttagcttgactgcatatggttttcacatgggtgtcttgtctttttagcccaagattccccaaagcatcttggtacctgcttcatatcatctggtctgcactttaacaaggaagatgctggagccccaccacagacatatggaatcagtatcctgggaccatggccttggaatcagcctttaaaaacaggacccaggggatccttgggcacactgctcagccagcctggggggcctctctgtcttctcatgcatcaagcccagggctgggtcttcaggaagctaggggatgggagactccagtgtgtcctggccctgtgaacaggctgtggtcttcctctccctctttgggctgcacgctccctgttgcatctgtcctgtgttgagaaggcgggaatgcacttctgcaatcaggtaggctcagaagcaagacaggtggaaatgctagaggtggtagcatctctctggggaacagagaagggaagaggaagtgagggcaagggaagtagacaaaggaggaggaaaggaaggaggacaagaagaaatgcaaaagggagaatagaagagagaggaaaggaaaggagaaagcaggaaggaagaaggaatgaaaggaaatcattaaagagaggaaggaagaaaagaaaacagaaaaaaagggaaaagaaaataaagaatgaagtcttcctgtgatgggaaactgcccaggcatcctgacaggcctgcacaattgcacctctgtatagtttacggacagggagaacttgctgactgggctccaagtgcaggagatagggctgcttgggagctgggtctggggggtaaacatgcccatccatagggatggttcagcaatgagcagtcactggggagcaggtagctgcctctaaccccttccttcttccagccacagatcctttccagccaatggcccagagacagagcactgggcttcccctgcctttccacttctcctgcctaccaatttctccgacttaacctgtgggcaagtctccctttccctatgttcaagatccttccccacatcttctcaggactctgcccagcagaatacagcagactcaatgaagcccctctgttggccaagtggtgctatctccctttggaagcccgtagggcaggtcctgcagtgatccagtgaggtgcttcttgcagcactggccagtagctggaaccaccagctctcccaggaaaagtgctgctccagggcccatcaggtcaaataggagagagacggggtcagtaggacagtatcctgcagatgccatcctcaccaggactgtgaaggccagtctgattctaatcttggccagatcctgaccatgtcaaccccatccagatgtcctgtagctgctgttagaccctctggatatcctagactccctgcaaagaccattcagagccaagacccacaaaggggtggggtaagaaacatcacctgctcataatgagtcatgtgattgatagcttatgggtctgaaggatgtttggggtcaactgagcttcaagttcctgaacacttgcttttaaccctcagtttaaagactggaacctgcctactttcctggtatgcttgctttcctggaagcactaccagtgaggggcatcatgaaaatccacctatctttcaaggcaaaagtgatctgatgaaaggccccaattgtctttcctccccagttctctttctgtcctctccccaccaagttggaaatccacatggttggggaaggtgagcagtcccactactgagctttgctggtggcaattgcttttgaatacacaaaccagaggtgggcagtgggggacattggtaaaatatctaatgactgtagcatggaggtttcaaacttggtcaagcacgggcaggtctgatttctgtacccttgtaaaccacaagcagtcagcatatccccattgctcactcttggtgtttgtctccccagtggctctgctctctcttctcaggaccacctgccccccactgagcctctgtctgtagttttggggccttcctagacttggcttcatacacaccctgctgcctcaacctttcaatgtcatagcattttcacagtgaatgacactttggaaatcacctagcccaaccctggaaaaagcagtgaagaaggacccagaatgtttgggttctggctgtgttcctcccacagtgtgacctaggtcaagtcacttggcctcgcttacattttcctcatttccaaaataataacacatactctgcctgtctcgtagaattgctgaggctaatcaaaaaatactgtaaagcacatgtcagacaggaggaagatcattgatcagttttctaagaggagaaactaatgctcagagagattcaggaacttgccaaaggctcatagcttctcaaatcactgaatgggtgcctgctctcagggatgtgtgcattctctgagagccaggctttctgtctgagcaaaggttaggtgtgcttgataatttcttctggaatactgagctgacatttcatgctgtgcctgtgtctagtctagcataggtgcacatggtaggtgtacttctggggatgaagagtgggagacctgctggtgtcctctggtatggctggagctggggtgtccaacagtgaactcatagatacaggatcccatcttcctcaagagtggggcactgctctgttcctctctatttcctcagcacctagtgcagagccaagcacccagaaggggctaagtcaatgttacagactgattgttattcaatatcggttttactcttttgtttgattacatggattttacaaatgaattggacttttaagtggtgaaactgcatttctttaaaataattccagaagtatcttcagggtcacaactcaagaaagatgcactgaggaggaggttagtccttctggaatgttctacttggagaaccactggcactctgtgagtcaggaaaagacgcaggagagatggggccagagttgaggtatgcgactgcagggaaacctcaccccctgagcacctgctttaggaatgttgggagatggaatgttgtcaggcctgggaactggcatcggaccaggaaggatggtggcattcctggaagatggatggggagaggagctgcctcagggtgtggtcagggggaagggagggaggcggccatgtggacacacgttctcctatgctggtcaggtggtcagcctggccttcctctcctgagagggtggagagagcttaggcaagactgtaaaaccctcagggacgccctccggtacccaaagtagaggacccaggggatgatgagggtttgctccacacttggagggtccctacaggatttttttaaggacaaagagagaaccagtcctgtctgggttaacagcccatctgctcctcaggagaccctcagcttcaggccagcctggctgacagcgaggatcttggggaagaatctagccctgtggtggcccgaggtcggcgggaagggtgtcctctgtgaaggactcacaaaacggccactccggggttctggcagctacatctagtcatcatgtgagccatctgctcttggtatccagcaacacattgatccacatgcttttgacaccctgctgggaggcttgggggtgggaagggtggaccgaggccatccaagccctggcctaaaagtggcctgctatgtggtgggggaaccttgaccctcaaaatagaaggagctgcaggggctaattcaggtccagtgtctgatagcaggcagcagctgggagaggcagtgtggcctcatggttagggtgcagaccctgcagccagaacctgggggttgcaaaacctggctctaccgctcactagccatggaacactgggcagccactgaatgtctcagcaccttggtttccttatctggtaagaggatgacagcacttagctcacagttccgatgaggagtgaatgaaatagtgtggcgtgctgagaatggctgtgaacgggaatcctcaggaaaggctttgtgtaggaggtgggacttgaactgggtggcgagagagggaaatgcatggaactgtgtgagccaacgtgtgggggtgggacccgtgctgggagcactgggtggaggggcactctgtctacctcctggctgtggggatgtctgcctggcaggctgtggcagggagagggtgcaggtgcttgcaggatagcccagcctctgctagagaacaggtgactcgttctccaagcatggggcctggaacctggctagtggaatcattgcttcaccacaaaggtggagccacaggcttcctgcatcccacagagagagctttctgagcacaaactgcaagccaggcacaagccaccaatctctccagtgccctgccttcccatggatcagagactcccagcttcttggaagccctgcctcatggtctacctggcagccttgagggaccaaatgaccttgcttttcccattaagagcctcatgccatgttttgtagtcctgttcccatccaattcaggtaagaacttggcttgaacctaggacattcctagtctctgtagccaaggttcttccctcctcctcttctttcctttccaactccttgactcaagtgtaggagctgctgagtctttggtcctgatctttctgcctcttccccatcccctccccaacatccctctccgggcataggcccattcacatactgccaagtgtctcacagttccctatccgggtcatggggcagggctaaccccactctctcagtctgttgagatggaaactaaggttcagagagattgaacacgaagcatgttatgagtagggctgggattagaacacagggctcccagctccctggccaaagcatttcctactcagctgccttctctccctccttgcgcactggctggcctggccacaggggctgtggggctgtgcagcctccttaaacacagggcggttttatcactaacaccctgggctccgcacagctttcttctttagctgtggtaggccagctgaatgcatctctgcctacaatgaagaaggcagcctaggagtccaaccccagcctcctgccctgattaacggccacccctgtccttgattgtgtcatgcgtgtgagtcatgtctcccagccagacagtgacctgctgcctgctgccatgggcacgtgcccctcttctttggggtacctgtggcctgagcacacagtgggggctcatgggagcccaccaagtgataaacagatcggaggctcaggcttgagggtgactgagttcggtcattgctctctcttttgagagtgggcttgtggagcaaaagaatggccaagccaattccaggacagtcacgcgcagcctgtgaaatgtgagctgtaaaacaccggatgtgaattcaagccttcctcagtcagcatggattagcatggcctgattctctcctcggaaggcaatcctcacacctccctctggtcacccacgcggtgtctttttagaaagcagcagaatgtgagcaaacacggagaaaagatattcctggagccttgcccttaagaactctcattttcaaaagctggtccttcctgtctaactgaaatccctcttgctggaagacacggcgctcagttgtgtgctggggcaacaaattataacactggctagacaagtgaggaaactgaatgtggtggggaggcgacttctcccaggagatcacagaagaggccagggcctgagtggggcctgtgtaaggaccagattccagaccccaggcagctcttgcaggctcctctcctcccactgagatgggagcagggagaatggcagctgcctcccaactatgatggccagtcaggggccacccttgtggctgaataagaaacacagctgcatttccctgtttcggccatgtggtcagtgaaacaaacaagacatttatcagggaggaaggaggagctgattggctcccagctcccctcccccagcacacttgtagctttgaccccaagcccctgcacttcttaatgcaacactcaaaaagcaaagtcagccctgcaagtgtcaggaataagtgggggaaccaggagaggagcctgggagcctggaggagggagcagctgtacctgaagaagaactgagagatggatgtgtgtgttaagcatgtgggagtgaatgtgtgcccgagaaagagcaggccagagtgtgcgcacatgtgtgcatgcatgcatgtgccagcacatgcatgaaagtgagagagagccctgggtttagggcatgctgcctttgtacagttgccctgttacattcgtggccatagggaagccatgccttgttattttatgccagggaagctggccagagactacccccactcctgatttctcaatgaaaaggctctgaagtcatccctcgtcctatttccccagcagaaatgacccatgaatgcttctcgcttctgccatgagcacaacgcaaaatttccctgttttcttcagtacagtgcccatccctccacctcatttccaaagccactttctctgcttcttcatggggctgggtaggatatgggagcagctagcggtgcctaaacattgtgcaggttctacacatagacacatgcgcgcgcgcgcacacacacacacacacagagacagagagagagagagagacagacagacagacagacagagagagtcagagagacagagagactggctcatgagctccaggcaagtcaatgaaatgcctaatgcagtgctgagtgttccaggaagatgggttgaggacaaggggcacagatgcaggtgtgccctgtccttggctcatccacgtccaggtaggctgccagggtctttctcatgaaataaacagcactgggagcttgaccaggctcctcaggtcttatgtggtgctgactcctcgggggactggctttcacatggaaaggagtccttgtggggccagagtgggatgggaagactgcctggaggaggcggggtcaaaggtgggcttaggaggagctcagagacattgttggtaaaaggaggggcctgagtgaggcacccttgaagtcattcttggtggagagcaggggtgactgtcctctcactcctcccaggtccctggcctggtgttcttcttccaggccccagggcaacccagcaatggcaggtgggcgaagctattctagtgagaagcaaaaacagtggagttaccaaaatcctggtgacagccatggccttggtctcctgaggccatcacctcactcatccctaagccctctaggaaaggggaggaagcctccctaggctccctctcctccttgcctccacttgaaaccttcaggagaatggctttgggaggcttcagggagatgcaccatagctgagaggctcacagatctttgactgggggttcatcatgcttttcccaccttctcgctccataaggaacagatttttggccagactggctgtacaccatgccatctcttcctcatctctgagtttcttccttatccacccttctaagtcctggggagaggtctccgccaccgagaagccttctaggactcatgctgtctggccttttgagacaacttcctgctccatgcacttggaatgatctatcaggttggtgcaaaagaaattgtgttttttgccgttgaaaatcatggcaattacttttgcacgaacctaatagctcccttctctaatatgtggttcctgcaagggcctgatttgctgttagctcccttggcctaggaacgagaggctcttgactttatcccaagagggcttatctaacatgctggtagactttaccctgaatgacaagatctctatgcaggcgtatggagccaaggagaggtgggctgtcacgggaggctgggggcagagggcagtctagaagggatgaaatggtagtggtttgccaaggagaaaggggtgctaagggattcagaacaggtacagggcttggtggcaatacccagagagcagaaggaggagaaggagctctggccttccaccccgtgtggccttacagcctgccttggagggtcgtggcctagctccaggaccaagcacctcttccctcaggcactctgagcacccgatagcatttacaagcaatattttgcatgctggtaactgggtttgtgcagttatgctgtggcctggggtaagacttcccagttgctagcagcaatgcctgtggtcacacaggatcagaggccgagggagcaccactgcccttccctgcaggttccccagctacgtggttaccagtgttaagctcagcccagctttggctgcctcctccccctacccttctcactcatcctgtgttgtggctagatgagtagtccaacctccccatctaagctccgaagtccaggggattgggctccacacactcctgaccctgccacactcttgctacctgcctgctattccttcctgtgctcttttagtcctaagcacatcctctctcctgaatctgaccctcaacctgcacctgttccactctcgccccacccgcacagtgctctctggccactgtggtccccaaggcaggttcttagctctctgcccctctctgggcatttggtcacatcctatattgctgtgggacccaattgtcatttgtgaatgtgtgactcctagcaggactttgggattctggaggacagaaaaaatctattacaactctctgggtttcctgttctgccaggcccaggactgggcaacctgaaggtgctcggccatgactggacaaacggatcatctgaccatgatgctaccggcctcgtgtgtgggctgatgacaggattgtagtcctgcaggttgaaatagggatgctgtgtacgtgtccattaatgtatctgctttggaacaaagaagacaaggcccctccggggctctaacccttccctgttgagtcaaccacagacaggaagccagctgcagggagggtgcctgaggggtctctgagaggcagctgctgcaggaagccctcctggctcccagattgcctcctaactgtgggtttattaatgcatgccagaatacctgagacccaaagaattcataatcaaatgatttctttaaaaaacataaaagaacgaaggaaaaggagagtgcactgcctttctattaagtcattcgtaattacctcattagagcagacactgtgcactcgtccaccagggagaaagctcatagagattcaagaaagaaaaaagcaggttcctttggagacttctagggccaggagccagctcccctggcacagacttgacctttgacatctgcagaaactacagctgcttggcgaaagcccttgggccatggtccttgccatctgaagacaccttggaagatggacatgttaccatcaaggcctgcctgattaggggacctttggtccccaagagagttggttctctgttaggtgctgggggtagcacctccattccccagagaggacatcagccagggagggagaggcttctctgccaagtctgccagggacagtgcctggaggggaaacaggctcattggtggtgagggacagtggccactgggatcagaccaggatatagccccagccccagcccttgccctggaatcaatgtagtcccaactctggctatgggcctttccccccagtagcactggacaggttccacaggttccagctggacctgcccccaagcacaggtcctggccatggggaggatgatacgggggaagggtaaagtggacaaagaactgggcagggggaagaatatcgggacactggtcttctgtctgccacggacactctaggtgactgagggtaagtcatgtctcctctatcagcctcagtttccccttatgtaaaaagagagcattgacctgggtgcctgccttgccagaccccagctttggtcctaggagttggtggctaggccactcttccagtggctggggaggggacacagactgtcctgtgacagagccttacagagaggcccagggtcacacaggaccttgtcaatgaccacccaggggctgagctgtgggagagccactggaggaagccacaaatggcccacaaagccaataataaacctgcagaaattgagtggaatgattgcatttcctaagtggggtgggcgcaggcggggctgatcgcttctgcaccagcctccttcttccttccaggagtgggactgcagagggtgcggtgcgggagggctgggggcggggcagcctgcccaggcggccctgttcccttaaaagtctcattagaacacgtggaaaacaatttgccaggccatgttgcgtcgccgctgccatgtgcggtttgctgcacattaaattcattattttaacaggtcaatgcctctgacagatatgcatttgtgagagatgagcacggctgcttctttaatccccatggattacttggctctcccgaaaagcgataccaatgacttgcagagactttaatcccaatcactccagactgtttacaaggagtaaaaaaaaaaaaaaaaaagatggtcaagggggctgaggctcagacttggcgggtgctggcagcagcagggacacgggggggggggaagctgggcaccctgggtgaagcccaccatggcagcagcatagagcgcagtctggcgggagcctgaggaagaaggcccttgttcaaatgaaggcttctcctctcatcagctggacgtggggcttgcctcctccaacccaaagcagatgtgcaggattgctggcctggggtaggaggtggaggggttctggggtggcctcctgaacacattcttgttcttctgtaaagttttcaatagcccaggcaggaaatagcacaggtggctatggtggtgaacaacaggggccccctcccaatggactcccataggcaaaaacacccaactcgccaaacccagctctccccagggctgcatgggggatttgctctgtggactgttctagaccttttctggatctgttgatgtccacagttgggtcctttcggggaactgtgggggaagccaacttgggcctgactcgagtgtcctttccgtggcctctggggacccttacagccctggcctgtccctctctgcaggctccccagccctgacccccaacctgacctcatctcctcttgcatggttccctgcaggttccccagctacatgtggagacatcactctctttgtttggctttcaagggcttcccttcctgctcaaggccctgggttactagctccagctgccatctttgggaccttcctcggccttgatcacctcctctcagtgctgctgttctctgcactgaaggaagaacaaagaggcctccagtcctgcagagttctccacatggttgatagatagacaggggatggcctggcactgaagacctgggtctcccatacaatgttttgctgtcctcctggtccccaaatatatgcacaactggattttactaggccagacttctactggagaaagtgtctacggtgtgtgtatgtgtgcgtgcatgtgcacaccccggcatacatgcttgtgtgcacctgttctatgtgtagtttcacctacctgcaagtatgtctgtccatgttctgggagcagcagctacctgtccactgaatgagtaattaattggtgggtggtaaagcaattagccctagagctttcaaaaataatgaataagggtcctgtagatgtcaatatttgaaaatactaatttaaggcctattagctgaagcaaattttaattaaacagggaataatcagggtgatgagaggaaagtaaaagatttggccagtggctgagtcctcaggaatgcatggagaggtgaaggagggggcggtgtggaactggagcttgaacctgaccggctgacatttgggtcatgatccagggcaggcaggggatgagggaggaaggtgaagtcacattcctgctctgggtctctgtaaggaaggaggtgctaagcagagaggtttttctatgggagtgcatcttttggggtgtggctgtgtttccaagggcgtctacaaggagtcactccacagtagctgcatcagaactcacacatccaaaggggctgcacctactccagtacagctaatgggacacaaaagcctttgacaggacttatgatttcagttttcccaaacaggatcatcgaattcccttttagggaatctcagttatgtaccaactttaaatcagcactcagaggaagatttactgtcagtagggttgtatgaggcaggaagacctgaaggagactactgaagtagggcccccatgtgttctgagcagcagccgccctgcaggaggaagtgtgcctgatccctccagcccacaccccgcactccctagtggctgagaacaggccttctttatttctgtatctcttccacaaacatcattttgacatccagagggcacacagcaagtgcttgctgaacccagtgacccttcgagggcatggactgtgtcttattcacctgggcacccaggatctagagtggtggttcccaataatgtttgcaggggcctgagcaattgcatcgtagaggaggcatggatgccccttgtctctgctgccgtatcttggtgagggagtcgtgcttcctgccatggtaaggaatatcggaacactgggtgcttgcttactttataacaggggctggggccatcgctggctacgtgggaggtgttcctctgagtacttgttctgaaatgtagttctctaccttgactcctgacaacctaccttctctggttacaaggaccctctatgggtgtggccaggagagaagagcctgaaagctgggaaggtgcatgtgtaagtctgtgtgtgtgtgtgttggggagcatgtgtatgtgcctctgtgtgtgctctgtatgtctgtgtgcattttatctgcctctttgtgtttgctggtgtgtctgtgtctgtgtgtgtctatagtctcattgtgtgtgcatgtctgtgagtgtgtatgtgtgcctatgtgtgccagcgtctttgaatacctgtgtgtttgcatacattctgtgtatgtttgggtgtgtctgtttcatgcagcatctgctgcatgtctatgtcagaggtcttggagtttccaagtgggtagtgctacctcatgcagggactgcttcttccctgggcctcagctctagcagacacaggcaagaacttcagcacacaccactgcctctttgtttggttatttatttataacccactccatttaaaaaatgaattgagtggagatcttgatgaggctagggcttccgtttggccttgcgcaggggctctcctctacagcctattgaggaaaatagaacaacctcatcatctcttcttaggactgatccctacggaagaccccacacttgggcctcatcctgccctgcctgactcctgtgtcaggcacacacctgcacttcctgcctcccacttagctgctccaatccctgctcagctccaatctgtctcctgactctgaagcaggaagtccaggccagctagttcctcctactggccacgccctttgtctcaggcacctcctccttcagcatctttccctaggaacagtgcggctctcactgcccacttctctcttggccacccctcttgggggaggtagaccttggctctgtaccctgccatccgccaccccacctcagcctgagctgactttgtgggcaggaaccacacagcctcctgcccagtcccatgcctcccacctttgcagctgagcacggactggggaccccatccactcagtcaatgctggtggaattgcaagttgcataataacctggggccccttggaaacttttcatctcaacacgaagactgattaaatagcaacaaaaataaattatgtatacacagagttgtaaaagcacccagagactggagacttggggtctgtgcctcatataaatgcaaatactgtaatagcattgcagtgggccctccacccccactccacacaaacctcggggcagggagggtgaagccagcaaggatggtgtgtagcgcagtaacaggctagagcctgctggggctttaaacaaaacctaaagccaggcacaagcccaacccagcacagaaacgaccagataactgaggtttagggcctggtttttgcaaatgacaggctgcagaagcagtgtgtgcatctagcttcctctgagcagaatggggggagcactgagcagggcacccctaagttgctgtcagatgcctcctcctggctcgggccccctggtagctaaggaagtggcctgtcaggccccctctagttgtgtctcccagggctgagcaaagtgcactcccaccccaggggaagtgcttgctccttctccttaccccatggggatctggcacattagcaggtctcacttggtctggaggtggcgctggtgctttttatagctgtaggtgtctctgggtaaggccgcctcccccacactcccatccattgcctgcttcttccctcccacaaccctggtctggggaacttggccttaggcctggctgctgggttaggcttgggtcctggggcaagtatagggaggaaaggactctaggtgctgctgtggttgggtgttgtgggtgagccagaggtgaggatgggccgctgagccctccttgctctcctctgtctggggacagctctgttgcttgactgtgccatctagttcactccctggcgtacagtaggtgcctaattaaaactgaccaactgactgattaaaaagtcattatgccgaaaacaattgcttcttttcctggaggtcttatcatctcatcttcttttcctggtgggcttatcatctcctcatttttgtgttcttttgctattacacagccactttctcctttctttcctttttttttttttttttttttttgagatggagtcttgttctgtcgcccaggctggagcgcagtggtgcaatctcagctcactgcaagctccgcctcccaggttcatgccattctcctgcctcagcctcctgagtagctgggactacaggcgcccgccaccacgcccagctaattatttttatatttttagtagagacggggtttcaccatgttagccgggatggtcttgatctcctgacctcgtgatctgcccgcctcggcctcccaaagtgctgggattacaggcgtgagccactgcacctggccctttctctccttctaagttatgtgaaaactcaataagccacagtcaccatattaaaattaaattgttaaacttccctggcagttgagcacaggactttaggtttttcaaaatgtcactgtattaactctcatctcatcctccaaatgcatctgcaaggccgtctgggcaggtaccagcatgcccaatctacagataaggaaactgaggtcccaggaggcagcttgtctatgcccacataattaagcccctgagtccttggctttcgttctgtggaaaagctgtaaaagcgtgaaataggtccccccaccttgaacacttaattttccactgattgcaaggagtgtgaggcatgaaagatgcctgtctattgctgtctctgggcctgagctgggaggctgtgaggctgggagccctggcagcctagctttgggtcccacctggtcctctctttggattcactcctgctgggtccttagcctccagatcaaacacactggctgagaagcagccagcactgatggcctctgcccctcaggtggatcccaccttctcttctgtgcagcagaaggggtgctgttgtgagggccacccgccaatgtgggggcacaggctccagaggcccggagactggtttccatctgaggaggcccccaactcccagcacatcccacctgggcccagagggggagcttggaggtgggatgggaaagaggacatttgttctactgatttatttgaaaagaccaaattagagaaataagagaacaacagataggagaaatcatggtaggcacactatccttcaactttataaacaacaaagacaatgaacgctgcacccggaccaagcaaagcaaatcctgggggcagagagattggggagagctgtaagatgccaagcaaagatgtttgaaatgaaagatgcgcaggagaatacaacatattctcactcatgtggtttggcaaaaatgtctgcaaggacctcatcatgtgaccatctcatagctgagaacagagaagctgcttcctgtttcagggctagtggcattattcaaggcagggacctggagaggccagcactgctgccctggagacctggccagtgcctcacatttactgttttctaccctcctcaacattctcctctttcaggaagccttcttggattgagctcctaccttgaataactttcttactatgctctctcagctccttcatcctctttctatttcatgctcttttgatttgctcctggtcagaagtgagcttgcagtaccagcaggcttctaatgcctgtctcctgtcccaatccacggtatgcgcaacacaggaatcttattgccacacacacctatctccaacatgatacaaaaccaatgagtggattgaacgcctgtgggaggtgagcagtgagggaaagtgtggctaggatgtgcccatgagtggggtgctgccccgttcacctctcttaagttcagtgcctcctacaatggccccctcttccccaagaagtgactgtgtccctaggaacgtgagagccagaaagcacttatgggatcatttgggcccacccctttttttgcacagataaagtgactatgggcctgcctagggaaggagctgtttcagacctctccatggttaaaggtggcctggggacactgcagcctgatgtcccatgccctgctcttgccaatacaatgcagcagttgatgtcttctctgtggggtcatcattcttttattgtacatttttctggcccccaactacactgaatgttgcttgaggacaaggattttatctctgcctctctgtgcccctacggtgttcagcacagcacagagcacacggtaggcaaatgatggtgctattaacatgagaaccattttcgtttgagcttttgtttttgggagttatctcaaagtgccaggtcggggccacgattgtccttgtcttggagcatcttgtcactggccaagcatggaatggggtcacctggcaagtgaggagctccctgtggggaggagtatgtaagcagacggggagaaggttctgagagtgagtctgaggatggaccacctcttaggtggtctctaagtcttcacgattctgtcacttggagaatgaaaggagacgcagggaggtagactgggtggcagtgtctggagcctgggaagatggcttgccttgtggcaaccagtctttgagactggctagctccctagacctcaaaatccctacaagaggcagagtttggaagtgtttatttttatttatttagttattcttcccacacccaggcctgtgtggcagaagtttttaaacagagaaatcttagttgagtgctccctacacctaaggccctacaggcatctgggtgccaagggccggactaacagggcttggtatctgacgctggtgagctgatcgctttgttggggagacgggaagctgcacataaactctgaaacagaaaccataaaaagtaaattaatactccaagagttaactaatagttcagaataaaaagagaagcaatgtttcaaggccctacacgattagctgcccaatgaggagtacagacaatgagggtttgggttactctgaggagaaagcacccacctcaggctgctgggctcatggaaagccccggaggctggtttctggcatttttggtctattaactgctgttgtgaccactgaaatttgacttccaaggaccggaagcccagagctaattctgcggcttgttggtcaggggctggtaccagtcaccttcatggggcaaaagcgcttcagtggcccctgtctaaaacagggggctgtgccatcatttcccctgcccaacctcctctgggagtgaggtgcagccaccttattacaccagcgaagagcagcgaggagatggaagagagccgggggtttgctgtgccacccctccctggtggggtgaatgagcagctgcaccaggaaccagggcctttcgggttgcatggggattggccttacagcagccactctgttgatgtcaggaggccacagatgcgatcagtaaatacctagggcagcctgcctgtcccacggccctttcagtgtagggagtagggaggagaatctggtctcctcgccaactccccaagtcctcccagtgtttgatttgcgatgttgctcctaagtacaccctcaaacaccttcctcctgcaccccctccttttcccagttgaagccctgagcagggaaaatgggcatcttgtcttccctattgcagggggaaattcagatcttttgactaccccctccaaaactcttgggggagaaaaatggcaagtccacaggagggggggatccaggggatgtagggaggtcacctgcccactctagtaactgttctcttccagcccctgtctgggcttccctgggttcccctttgggggtagagaacccagggaaaggtgatccttgccacatcccacttcctaggactcactactctgacctgactgtgaacaaaccccgttttttagctcagctgagacaggtggaatttttccagttctactttctctgtgagcatctagaagccacaaagattacatatcttgcaggaggcccagggcttgtttggctgacctgtgaccagcctgcagcccattccccagcctgtctggtgtccatgtgcacatgtgtgtgtgtgcacgtgtgtcttgggtgtgtctgacatgttgctgccctgctgtcaatggttctagtctgggtctggggtggggctgccccttttggctcctagcacctctcttcaggcttcagctctcttgaccactgagtttctctctcttgcttagggtctctgatccccagttttctttgcagagcagactgagacaactgccaggttttgaacttaacaaatgatcaagctcttctcagctcaggatctcagcaacacccacttccctggattctctgcaatgattcatcactcaggtgccttcttcctgcccccacctcatcacgtcccaacaaggcactggctcccaggcgactctcagcaggggaggctgcaccctgtcagttcagcctcagttgacaccccagtcctcagcactgtagcccaccctagcgtgtcttccagagagggtcagagccctgtaggatgccacatccccaggcagagcctggcaagaccccagaccttgagagagcctatagggaggagaagaggtgaactagtggatatgaggaataaacccaggacagagtggtgtctccctagggttacagattggagcaggtggtgggcactccaggacccccgctgcagggcccgcacctctctgctcacctctctagggaggggtgagctggaggcagcaggaatgacttcacatttttgttgctgtagctgctgggctgaaaatagtcctttctcgggcaggctggctcagggtgtgaaaagctccgttcccagggagcggcaggaaccagccagggagaaaaattaaccacaggcctggcgctggctcgcttaagagaagagcgtggctcaactctccagcactgtataccgatacgtttgtttaagacggtaaccacgaactcgggagcagttcgagatgccctcaaatgctccctcattcagacagcatctgcaggcacaccggttaccatttcctgagggcttcctgcccggggtgctgtgctaaaagctcctcgccttgcagtgtcttatcctctagagaccctggacagagctggtatcatattcattacacagatgtggaaactgaggctggggtaaatcaagcaggctgcctagggtcacacagcaagaagctgcagaggggggatcaagagccagggctgacctctgccctctgggggagtttctgttattcctgtttgcttagggggacaggtggccccagcacttccctggcaagcagctcaggctatacagaggctttggttcttcacttcctaggctgcctgctcaggagaacacacaattcagaaactgttcctgcagccctttgaagggatggtcagaaatagaggcgccttctccccatgttggagggaatggctggggctagagggaagtcggggcacttctgtacctctgcccaggagccccagaatctaaactcccacatcagtgtgatcacagggagcttgtctattcccagcacaattcccaaccttcatttccacccaaaagtacaccagataattaagtctctctcaggcctcctcaatataatgcagattaatttattatttaaatctgagtagaatattagctcattgtcttaatagttctgataatggggggagcacaggatagaaatcctctcactcaccccctccccagccagaatggaaagaccccaggggcttgtcaggcagctggcagagtggctgcatgcagcatagctgggggccaggctccccagtgggtggcaggtggctacaagtgtgtacctccaaattgactctcaatgcaggccccaccttgagctctgcctgccccaccccatgcccaagaaagaaagaagaatgagaaggcaggagaagcaggaaccagaagcaatttcccaagctggaggctgctgggagacccctcctcctggttgatggggactgggtgaggatgggcaagcacactggtgccaaggtcctagtgtcaggggccctgcactctgagagccgggaagcctttcagcattgcagtcttcccttctcagaaatggttctggggatatagatatcttcaccaaacgatccagagagcacttttggtggggttggttgtgggggagatactatggaaactgggggaatgggggcataaatggtcttggcttggccagcactctgcttccccactcccacccatcttgtgtcctggaggaccaaggtaaggcattagagtggctgccgtctcttcctgtgatgcacacttcttccccataaaggatctctggcgaggacacatccaggcaggtgggcagaggagttgtcctggctgcctctatttcccagtagagttgtcttctcagcctcctgatctccacagccagagacagagataatgagaactttaacagtcagaatacacatcagcactgggagctgtggaccttccagctaagtgcctctgttaaggacttgacgtttgtgtccccctgccacccaaattcttatgttgaaacctgtattgggaggtggggcctttgggagattaattaggtgtagatgaggtcaggaaggtgaggccctcatgatgagattagttagtgtccttaacagaatagaaagagaccagagctcagtctccctccaacatgaaaggacatagcaagaaggcggctgtctgcaagcccagaaaagagccctcaccagacactgaatctgctagcaccttgattttggacttcccagcccccagaactgtgagaaataattgtcttgtttgtatgcccctcagtctgtggtttttggtatggcagcccaagttgcctaagacaacctcactatgctgatgtggagactgaagcctgaaaggtcaagtgattgactgtcagtgaagagtgggttggttccagactaaatgatgtgactggtgttccagatgtcagtgttaccccttgaaatggaccgagtatccatggtggggcaaggggcttggcaaggcaggatgaaggtatgtagaagactgggatgtgatcctgtgcccaggatgctgacagagtagatagagtagatacagtttaagcagctgtcctgacagatgaggacactgagacccagggttggtagcaggaggggctggcaccctacctctcaatgtcgtgcaccctaccatgtttgaagcttccctggctgcatcctaactttggaatagtggttcagggtcatgtttaccctggtgccttccaggtctggagtggtgcaggagccgttggcacagaaggtactgaatccagccagaaaaaatatacgggacacatcgtgtggctgtggtttcttcacaccatccagtcatacagctggcaattaatttcccctataaatgaaacacctttcatatcactttatctagagagcttgaattgacagccgcgggtgtaatttatacatactttttacccatctgttagcattcaggcttcaggctgcttgcatttttttttcttcaattctctccccaaattgaaaggattaggttaggattaggtaagtgttttaaccagatattcagaaagatggatggcaatatttccagatggctaatgcccaggggaggcctcacacaatggtggccaggtggggctcagtgatctgggaaattgcctccacctgagagcccagcagcctcctcagtcctgatgctggaactgcagagggccccagggactctccaggcccgccccttcattttacagatgagaaaactgaggcccagagaagcaaagggactctcactaggttttgcagctggccagaggcaggcctggctgcagttagtactggagtgagggtagctctgctttaccctgagaggggcaggcggtgggtttgggaggcatggatacaatctggaagtacttggatggccatgggacagtttctcttgtccctcagtgtccatgaaagtggggtttacataaattgaaagtacaaccaaattaggtcaatttctggagggcttttttctgatcatgtgtgtgcatgtatgcatgcatgcatgtgtgtgtgtgcatgtgtgcgtctgaaatactgaggagctcatgagggttgtgccacacccctggacatccacagccctgctatcagtgtccaaatgaccttatttcctctgacactgtgtgccttcttctcctaagaagtcttgtcttcctgaccactccaaggaccttgggggctaggaccatgttggagcccttggggacctccacaacttggcctagtcactcttctctgggaagctctcccccaccagctctcctgtccccccatatccctggagctcccaggtaggaaccaattgagtcccctcaggccggtgtgggaggcagggctcagtttgtgtggctggacagcatcatatcatctctggcttagggtgggcaggggctagtgtatgcctgtcttgcatttctttggggaaacatttgtccccaagacatttatatgtgtattaaatgatgactgatgtgtagtacagccctgccttaggctcctaggaggtagacatgaacactacagggtcctgtcctcagaggtcacacaatgacttctggtcctggggatggcccacctctgccactcaaggccacagcaaggtgctgatggctcctgcttccttcatcacctccctcttgcccaggctcagccttggagccattagccatgtgactctgtctggttagaatgagtaaagcagttttgtattaatgcagggacctggggagatttggccattaaatgttacattagacccaaggtgtcctgtacacgctcccggtggagtttttcaggcagccttggctggggggcctcggtgagggggaacgtgctggaactaacaaccaggtggggaggaggggaggctgggctgcgctctcctcctggagctccgaggacatcctagagaactgaggaggaagggcaggcacgtccttgctcccattcagccccaccaggccttgctggccatggctgggtgcccagtttgtctcaggcccagtgtgaagcatccaggctcagcccgctgtcccagggcagccctgatttcacttcttctaccatctgaggagcatttcctccatgtcagaccagatgtcctcagcttcagctccaaaaatacagccacaggagggaagggaggcacagaggagaagtggtgtctccttccttggaggaggtggggcccacagggaataattaataaatggcaccggttcaatttaaaatacaactaactgtatcctgtggggcaggtgattattgcaatgagtggcctggaggggagagcgaggatattggctgcagtcatctagtctttctgtcaacctatttaccccttgcaatcacctactcatccacctatctacctacctaactacccatctgtctaactagccattcccctgcttatcctccaaggaccttggacaaactacagaccctctgggccttggtttccctgttgcaaatggagataacaattctcccctgatctcctgagcttgtttaaaggattggatggacttaaagatgatccgtaaagtggtgcaaggaatgtgaatattagatagtggatgcattatttttgttgtcaacgttactaccaccacaaccgtatctgccgctgctgatacctagaccgttcttgccttgagatcattttcagactgtctctccccgctggaccagtgactctggacatccactgaaggaaggcttgggatttgtttttaaagatctcccagccacggagggtggggcagatcctgaaggaagctccagccagccagctccctgtctgctttccagatgccagggagctggctcctccctacctcccagaactcaacaatgctgtgtgtgtgtgtgtgtgtgtgtgtgtgtgtgtgtgtacacacacgggggagatgggaactggggagcaggcctgtgggggctgtaagtgcattagtggctgggatggttgctgggagacggcagacagatgccggatatgtttgtattttccaatgttaaggcctcagaaccagaaaaaacaaaccaggagtttcaaaatgaggaggctaattgttcggatgggaagatattatttacagtaatggggcaattaggtaggaggggtagaaagagtcagggtggtttggctgcggcagcctagtccagcccccatggggacgaggtggcagccagggactattatcttgagtcagaccatctgctttgtggtcaccctctatcttgcaagatcaccctcttttggggaaggtgcatattaaacagaaggggacacctatccacccagggtttcaggagtggcagccagcttgcctccccactcaccactaggcttgtggcctggggagcattctattcttgaaggcccagtgcagtcctcctccctcaggaagtcctcctgacgactgcaactcacacccattccccctcctcagaactcccctgaatctccacacctgaactgcaaagaccctagatgacacggtgcgtcaccgaaaccgcaaagaccctagatgacaccgtgcgtcacccaaaccgcaaagaacctagatgacacagtgcgtcacccaaaccgcaaagaccctagatgacacggtgtgtcaccctttacctggggcatttcctttattgggtgccccactggctcctgctggcacaaagctgggcctggccagacttgtggacaaaggatgaattacccaggggctttgggagggtgaatggaggaggagaagaaagggataaaaatcagcagcagcagctcaatggaaggaacaaattaaaaaaatgacgaacatggcttctgtagggacccatgcctccaggcccacattcatccacctgcttgccaagtcgtgacataaagaaataaagatggaagttgagaatccacactcaatacgcaccaaactcttagatctcagattgattctcactagtcatttgagaatacttaaaaactagatctcagaaaaaaaatttttttccctttgaagcagaaatggcccatttgcaaattaatggctgggtgggccaagataccctctagaaagggagaagggatggctgtcaatagctgaggaagggaaggtggctggggtgagggtcatcacagtgcatgctactgctgaagggggcttggcccaaacagcacagcgagcccatgggaagtccacatggcgactcccgggaaggttgctttcagtccaccgggcacatttccaatacaaggaaacagattgtgctgtgcctcgtctctggacagttgctaagaagaggctcggccgctggtagcacagtctgcaagaagggctgtggaaccctgagccacctgtatgggaatgaacaagacgtcttacggaggcgccttgcaattgtagaattctctaaggaacatctgggcagggctccataatctccccctctccgtcctgttaagctctccttccttttcttacacagtacctgctaccaaccacactgccttctgggttagtttgcacctatcttcctagtcttgtctgcacccttacttcccactaccttttgctttcaaaattctacccatccctaagcctcccctgacttctgcacgtgtggccaaacaaggggcaacttgtttccagtgcgtagcttttgtcttcccaaatgggagctcctggagggtgagaacctgacgggagtggggatgggattgggaaggggacgtgtcttctgtggattagagctaaaccctagagcctcacagggggcaacgccctagcctgtctctgtccctccgcctcctgagacttatttcttctccttcctttgcttataaaagtggaaaagtagaaaagacctggaccatcattctgcttgttaaaaataaacacaagaggcaggctctgggttagataaacaggggagtggggggagggtctcccaactgcaccatctgccctgtgctaccccatactgattctagcacactccctctgcataaaggccctgggctggcaggagaggaggcccatggcctgctgcaaggtttgagagagctccccaccaccgaagtgtgtgcatgtgccgaagtgttttggcagaggggcttcagccagcgtttctcaaagcaggacaatgacatcatcagtgtgggtggaggctttcatccctgaatggctggagagtggctccaaggctcccctggaaggcctcaggaagagggtccaggcttccctgcccacatcttcattggtatgaaagggtggggagcagaccctgattcctcggctccctctccctctccctctctgtgtcggggctgggggtggtcactgacatggaatcctgagcctccttctgtgttcacaagctcaatcccttttgcgcataattcatccgccctccattcgccagatatttactgctcactctgcccagcgagatgtcaattcaacaaatattcagtgtgcatattctgagtgtcaagctctaaaatagatgctaaaaatttagaggtttctgcaactgaatatgggcctgacgtgtatctgtgagattctcctcacgctctataatccttggccttgaatctcagcactgctacgtactggctgtgtgacctggggccagttactaacttctccctgcctcaatgttctcatctgtaattggggttgctgtgctgattaaatgagttaacatatgcaaaatgctcgatcagaacctactatactgatgtcccaagttcctactatgtgtgagaccctgaccctgagcccattctcttgaccccagggtgcttaccctgcatttggtatccaggcacctgtatagaccccctgtgtgggtaggggtggatcccccctagcatccccgtcctggactgcagctcaggagtccagagcccgagataggtctggagacactgtaggcagccgggcaggagctgtgtctggacgctttgacgaactccctgagagaggcaaccgtgggaggaggcagcgggcatcatctgtgagtccttcgggggtgctggactccatttatggtgaggtcacttatgaatattaaattctttgctccaggctccaaagattcccactgccctgctctacccaaaagccaaggttacagccgtaataaacaaagctgcccttctccaagagaaacatgctctctctctctctctctagcatgcatacacacacacacacacacacacacacacacacacacgcgaacgatgcagtttcagaggaggaaggagggaggtggggaggtgcaggggtgggctagttcctgggtatggggtgtttctctgcactgtccatggccccgacaggctcaggaggggccctccagacgaggctccccattcccttctgcctccccgtacctccctcccggagtaagattctgagagacactaggtatggtcaccaaaagaacttgagttgactctcagaaaataaagggagtttccaggagagggtgctgttggaacatcctgtgtgcgtgacgcgggctcctgggcttgcggcctgcagaagggcacacacagcctgccagcttcaggtgcagacagaggctgggtggggctgctcggaaaggaggagggggcatgtaactgtaactttggtgcactttttaaagacatagcctgagggcaggacccaggaacctaccttttaaccagcacctctagttctggctgatttaggtggcctggtgctgaggacaggctgagaaaggctggcgagagactaggatcctacatcctcccctccccaccacacttcagagaccctgggctgcagaagcgggagcagaggggccagtctgagccctttgctggacatcctgccccagagagcgcggccagggtcttgtttctctattctcccccaggggagcagaaatggagcctggaagggtttctcggtgtttcggtaggctgagtccctgagttgggtttggggtctgctgctgagtccctgaggggtgtctggggcctgcagctggggtctggggtcggtagtcacagtgctggcatccaaatgtgtgtgtgactcagagttgtcacctcgtggggtagtgctgccgccagacagcctggggctgagttacaaggacacaatgattaagatgattaagcagaggaggggggagcagggagagagaggcaggcatgaagacaatgcccgcaaggatggggtggcagatgcagggaggcagaggcccagggaggggcagagggacgggacagttggaaagaaggcaactctttccaaaagagaaagggaggcataagtccgatgcattccgtgtctcccatagagcttcccctgagaagctgaagaggagaagaggcagagaaggcagacagggaaatggccacgggaggcctggaagcctcatgtcgcctgtgtgcccgcaggtctctttctctgtctcccaccaccaccatcctcctcctccttatcatctaccctttgagtatctacgctatgccaggccccacgtggacccagcttttatcctcttcacaacccttcaaggcaggtattaatatctccaccttacagagaatgagaaggaggctcagagtggcgagagcccggactttgacccaggctttgttagcgccatcctcccctcatgcttgcggttgctgctccagagaaggtcacagacatggatgctttgccttagcaggagcggactaacgtgggtggtggggctgtgtccaggtggattgtgcatgtgatgaggagggtctgcagactgcataaatgctacagccatgccacacttttgaaccctcattacccatgtgcaagagacggatggatttggagatcaaggaccttgtattgtaggccaggggctctccaggccagtgacacagccccagcctggaggggtcgagccaggcctgggtgaccaatgcagccccccagggtcctcaactgggggtgctgttgggctccctgtgtgagggagggcaggaaaggcttggactgtagtttccacaggttcatatttgagtcctggctctaccactcatgagctgtatacccttgattaaagtccctggtctctttgtgacagcttcaccacctggaagatggtcccagcccccagtgtgtagggttaaatgagagtccatgtaatgcactggacacagtttctggcacacagcaagcatgcagtaaatattagctaatatttctttaatcattcaaataatcatttattctttggttcccacccttcctcctctctctacctctcccttctcctgagctccctctctcctctcccctcatccctcactgtcaagcctgttttcagagagtctatcaggtgtcaggagccactcacgagaagaccatggtgttgctgggcagcacaattaagtcagtaccacattactggtcattttctgtgtgcaaagccctgtaatttgcacaagacacactggcctttctttttccctcaaggagcttctgccaaataggagatccttggcaagtataggagtgatttcactcattcactcactcattcattcaccattaaaatatccttccttgactatccagcagtgtgtgatcagttgcagaaatgaggagatgcaataaaatcctgccatagtcgctaaaagtggaataagaaaagaaaaaaaaaataatccgataaagggcagggtctcattattgtgaggccaatgaaatgccacagtgggtgcctgtgcagccaacgggccaagggctctggagcccagaagccaatcaccaaacacttggcatccaaattcatgtgatccagagcacgtcacagagaggctccctcttgattacaagactcaccctcacatgctggtttgtgaagcggcttgagtgcattatcttgttgcatcctccccatagccctgggaagggcttcaggtgtcactacagacactgcacagggaaggatggtgacttcccacagttccccagtgctcactgtcagagtcggggcctcacttgcaccccgtgctcctttaccaccccttccaatccccattgacccgaactgggccttcctctcctgcagctggagggagcgacccgtttttctttctctgtgcaggctcgctccccagcctccaggagctccccaggggccctggcccacccagcacatccttggctgctggagggctcagagccctctttgcaggtcagctgtgatgccacatgggccctgggttgaggggtgggtgtctgcaccctctacccatctggggcatgactttattttctgattcttacctgccctggtgttcgggtttgggccaatgttcctgagtttttattgactgcctgtctttttgtgggagattcattcacttattcagtgcctcttcccatctttgttcattcattccacatgagccagtggagaaccctaacagccagatggccagcaccactgggtgaccatcccccaagcacctccacctctcctccggggccatccagggctccctgcagctcccttgcttccatcctgctgacacaaatgagacgtatctctcctcagagccacattggtataagcctaggtctgagtacacggtggcattcagtgattcccaaattaaaatgatctagagccatgaggcagtcgaatggccagttgtgcagagcatcgcatagtcattacaggtaacttttggatgctcagtggtgctgacatcagcaggaatttgcttcccggttcaaactggagggagtgggtctcttgtcactgaggccttgaggcttgtgcatgatgactggagcctgaagcccgggcagttctccaggaatgagttctctgaggaggacggggccagggccctgggtgctggcagaggacagaggaagtccttcccttccctaccagtcaccagtcctctgaggtgtgcctccagcccacggctgcacagaagcctccctgactgcagccccactgacagctgagccccctggcgaggccttgccttcacacggtatggccctatgctgtcccctcccggctgtgacctcagtgccacggcagggcatgtccagctctgacgcatttgctgactggctggggatggggagtggcagccatccccaccctttccgtcttgcgcaggtgctggcccctgacagcgtcctggcatctgggaggctggcgggaactgccgtgagctgctctgaccgccttcaagggcactgccaggaatagatgtggccaccccactgcctgcatgggtctggcagcctcgagtgccccatctccagactctgcgcttcccaagaagtgctcagcccactgcctggttccttggagatgaaagttccgtttggtactgggaccttgctcttcagaatgtgtctactcaccctcccatggcatggcccagcagatgctatcctgcccaccctctgggcccacacgccacagccactggccaggcgcagacacagagccagctgactgtttgatgccagcatggcccaagcctcatgagctcccccaatgggtttgtccaagcaggaaacccttagtgacagcatcacgctcctttgcctttttggccaagaaacaatgccagggagatgaaatgacttgctgagtcacagcttgccagtagcaaaaccggaccaccaacccacagctggttgccccagctcagtagcctaggtgttcataggaaagagatggcttcaggattggagatcagggagggctgcaaggaggaggaggcatctgaatgctttagaacgatttgggtcctgaggcaagaggaaggatgtcatcctaagggatggggaagcatgggttgcctttgactgagagttactgggccagtgtgactgggacagcgggatcatgggggacagggaaaggaagaagcgtgcagcccagggaaaggggcatgacagtgctgggagcttgatctcaactctgcttccaggctggctatgggattctagggaggtgggagaagttctaccacccactcatttaagcttgcagggttctttgagaagccctatgccactgagtgacaggccctgttccagatccggggatacagcggtaaacaaattccctgctcctgaagcacacggtctagtggagggggaccaacaatgaacatgcaagtcagggcgtaactggttggacggtcacagaaacagtaaagcagagtaaggggaaggaagagctactttagataaaatggccagggaaggcctctctgataaggtgacatttgaaaagaaactggaaggaagtgagagagtgagccaagtgagcatctgagagcagagctttccaggcataggcagagcacatgcaaaggccctggggcatgtgggaaccagacaagaatttgtaacctcaaggtgtgtcccttatttagctggaggcccttggctctggctaccaccccctgcccacctttcactcttccacacccaggacgccatgagcccaggacaggcagtgagagcagtgggtgctgaagtccctgcactaacaaggagaaaacccaacttcaggagttgagggacacagggttttcccagagcccagaagtgcaagcctatgctatggaggggccagggtgggggaagaaaattccaggcgtggggaggggaagggagcagggaaggctcagaggctagagggtgtgtgtgtgtatttatatgtgtgtgtgggagggtacaagtttgtatgggagtacatgtgggtatattttcgtatgtgtgttatgtatgtgtgttatgtatgtgtgtatgcgtgtgagtgttgggaggaagaagcaggctgagcggtcccattgtggctggaaaaaaacgcgttctctctcgccctctctttgtgctatacgtctctctctgtcgatctctgcacctgtgtctctgtctccctgtccaggtctctctcggtgtctctctcctccctccctccctctcccctgcacccccttctttctctcagaacaggaagaggcctgcaaaggactgccatttccctctgtctccccgccccctttccctccccaggttttttcccttgctccttattcaaggcagataaagtgcgcacagctgctcccagctgaaacaggccttaattgcacccccgttgccatggcgatccctgatgatctccatggctggaatgttgccctccctatcttcccgctggggcctccgggcagcacagcctcgctgaccctacggggcacccgcctcacctcatgggctccccagatgccttcccctcccccatggtgcacagcccatctctttgcctgcagggcctcggtggtacctgtcactccttgggacgttcctgggtccagcataacaatgcacaggctcctagcaagggacaacacattcctctgtcactagccttggcctggtttttcaggagtgggaaggaggggacctggctcagaaggctgtgctctgggcctcatcacttcacttgtggacctgccaaagccccacccactgccctgagtgtggctgtgggcgcctttgtcaatgcaaagcagcccacatgttgcagtttctatctgaaggagccccagggacatggagatggtggtggccctggtagagggaagggctgcagagaccaggctctgcaatgggacaaccagcaggatcagctgccccccgtcccactgcagaggacatgggcagagtaggggacagagtggtggctcccttgggaggaggagggggacactgaggaaatcccaatggggacaggcccattgtgggccaggaatgtgagcctgataagggaggtggacagtgtggtgtgggctgtgtgtgtctgtgagtacgaacgtagtgtgtctgtgtatacgtgtgtgcttctgtgtgtctgtgtgtatctgtgcgtgtgtgtatgctgtatgtgtgcatgtgtctctgtgcatgtggttgtgtatgcatgtgtcttttgtgtgtgtgcatgtgcatgtgcagtatgtatgtgtatgcaggtatgtacccatgtgcatgtgtgtcactgcatgtttgtgcacgcatgtgtgcacatgcacatgtgtgtatgtatgtgtgtgtgtgtctgtggtttggtccacatccctgccttgcacttccctccacaggaccctctgctggcatccgagctgggccacacagtagctagcgcgtgttcacagctcagtggctcctgacaggggtctccgggagggcagtcgtacttagcacccagtcagcacaccctgaagagccatcagacatgacgtgggacagcgctgagcggcccaagaagccccgctgctggtgctgttccctcacatcacccactccatcctctgagcagcccaaccccagccatccatccagtggggcctggaatggagtgggcttctcatatcctggatctgatgggcctgcttaattccctcctccaccagcaaacctagagatgagcccagggcgggggatcccagcactttctgcccacccctccattcttgggatctgagccctcctctgcccagcacctgggcaaggctccctgcctccacgggccccttctctgggctggcatgtgctgcctacccatcagccaggaggcagggacagtgggatgtggggcaagattttccagaatggagcatctctggtactcatctctgccagcaatggtgtcggctgaatgcacgccaccctgagccacgcttggtaatgtaataatggcaataatagcagcaggagtaataacagctactgcttattaagtggctgccacatgccaggtgctgtgagtagaactgcagaactctaacacaccgtggtgtcttctcacaacccttgaggccaggactgtcatttctgcacagatggggaaacaggcggtgcctgcccagccaggcaactcagctcttggtggtcaagctcaaggaaccccaaggtggacccagaggcctgtggctgtcctaccccaggccctggcaagcagtttctctttccctgggctgtcagacgccagcacctcctgcctggggtagggacataggcttgaggggctaaaatgtcacctcatgcattgttttggaagcagaactctctgggaaaggatttctgcttgagagtctgtgtcacggtgtctctgcatcagagcaccaccccaccatgtccccaggtctgctggacactgctcaaggaatcatcctctttctcttacagaccctggttagtaggctttccatacatatttgtaaataagtaaaggtgtgaaatatgagtgcttcttatcttaattcatcactctgacttctcccttttctcaacccccaaatggttccagaattcatctccttcgcctctgcatagccacatctctggctgagatcccagcatagcctgagccaagtacccactgcccccaccccttcttaaccctcacaccccaagggagttgaaactcagggctggtacctcactgctccatgcaaaagtctcctccagcccgcagaaaaatgttgcctggctttgccagccattccagaccctccagatgaggcaccacccccagctgcccctcacacacctgcctcaacttcctgaatatgcttctacatctggcctctgccttgcttccgggttccctctacctggaatggccccctccttttctctgcctgtagcaataccattccttttatggtccaacatatttgctcatacttctgggaaacctcttcctggcctgcaaaggcaccgccctctttttacaaaactgaccacattatgtgtgtgttcttgccatttgctgaatggatgaatgaatatgataaggcagttcaggaaaaacagcttgtgtttgtggggtactccctaacctttagcccaatgctaattttcttgaacattctctaaccagccccagtaactctcagggtcacatttcttcaaagctcccaaggaggggattatgagtactgaccgtgtgacactcttgggggaactggtccctgccacaaaccttcactggggctggaggctgctgtcctgactttaagggctatgggatttaagagaaaggggttacagaaaaagccgacccttgaactgggaaagatttccatggagagaggtcatttcaggtggagggaacctcaggagcaatggcaaggaggtgggactcggcacagagcatcgggggtcaatggtgaggaggctggcctgcctggggtggaattcaggctgagggcagggtgcagatgacccatcagggcctcaaatgcagactgcagtcactggatggccagcagcctgggaacaggggtagtctgaagagaaaatgccgatatgagcctctgtaccaccctggcacctaataatacataaggtaaaataaagaagcttatttttccagcaggactcatgaactccccacaggcagcagctggttttcttcttccttctccccgctccctccacccccgtcctgtttgatctaacccaagtcttgttcttcaggctgaccttgggttttgcctggatttggactgagctgccttctccaatgagccagcattcctctccactcatctgtctttctagcaaaaaacccctattgccttgcctccagacagacctatcatatttggaaaaaggaagttataattcaggttaaaaaataactaaaaacagctttgcaaagatttgtgcactgggaagcagaaaagcaaatcatatccctttgcatcccaacaggtgggcagtagtttctcgttgcctgaaaggggctgggaggtacgagaggatgcatctcaactctgagcatctcctgttttccatgccaggaggcaggtgggctctgttctatgaaggaggcctgggagcccagtgaagtttgccgcattcaaatgacccaagtcagacctttaggctcctccagtgaccctctcttgcttgggtgggggacagccaaccctttgctgacctcctttacaggtagcccccacatggttcttgtcatgcatcttgtgaccttatctgttgtgagcaccttgaaggcaggaatgtagcttaattttccctgtgttcacccacagctttgttcacacccccgcaataagcaaggtattcaggacaaccatgctgatatgtgatggctgtattatgaccacccatcaatatggaaatgtccatccggcatcaggaaaaagagtccgcctgcaaagcatattttactcccaacatcacactttgtttaattaactatctccactggcggttgttaacacaataaaatatattttttaaaaataacatgattaaccttgggaattaaagagtcaactaaacacattgttttcactgtaccaggcacaggaaccagccctggatgtgctacggcccctaatgaggagagcagccatcagttaacttacagccctttcctctctgtgacgtgtctccagcacgaggacatgggtccctatccctagagtcagctctgccgtggccaaagtcccatcccatctccctagtgagagccttctccctcagggatgcccagtctgtgcattgctaagtggcactttaggggaaaaaaaatccacattcaaatgtatttctctccctctccactcaaaacctctgggcttttggatacgagagccttttatttccttaaaacagcagcgccttcattttgttttaaggatttaatgcattgagaggtgggaggagcggatgggaagtagagaatttctcaggcctatctgctcacaccttctaaaggatgaaccataccaagtgcagagcatccaatatttgggccaaagttaattctttcttcctttgtcttcaggcttaatttgctcagagggttcttgtgagtgagacctcctctgctttttattattctacctcttctcccttctctcctcttcttccaactcatgtccacttcccaccaagggtgtcactgtacccttgtgggatagcacagccaaggcctgggctgtagggggcaggaaggaatgtggtttggggctccccaatgagaagcccctctctttccaggcccataattggggagccagggctgacagggctgagcccagagtgcctctgccccagccctgtgacatcagggctgtggacacagaatgtgagcatgggcagtcagggaaggatgatggaggtggatggcagatccctgcagcagatctgcaggacacacgcttttaggtcatagacaaggtctacaagctgggtcactgcaggaaatcttgccacagagaatgactgatcatatacccgcagctgggacaggccgaggtttgggcccccgggctctcccagggctctgtagagaggtctcctcaccctgatgccactgagggccagaggagcctccatcctagaatctcgcaacctccttcctttggagcctgtctgcacccccagacgggaaggtccctgagggctgggctcactcttcattcactctcccatctctagcagcatgaaatgcactgagtgacttcttgttgctgaatctgggccccgtggcttctgttctcctcctgaggcctctggagtgtcatacctacccttggtcacctgtggcagagggaaccccagagcctcggtcctgcttcagtgctggcaccttcctctttggctgcacagctgcccctggtttctccccatcaagttatccctgggccttttcctccttctccagggcagacaccctggtctggccttttgcttctgaggccttgtttccacctctgtgccttaaaagaaccctccattgtggggcttggtaaggactctggaagtggcctcggtggggtggcccgtagtgctggcttgttgagaccctgaaaggacaagcctgcttctgcaggcccaggactctgcctgccctatatggattgaggagtgaggctttgcttctctgtgtgcaggacctgggttaacaacctgccttgtcctgctccgtccagccctgcacgtctgacagcgtgtagtcccaaaggggactctgtcaaagggctcagggccactcagatccatgatgaacatgactcccttatctgcagggccacatctttcccaaaaggcttctgctgccatcttctgactgaattcctttgggtcgaaattaggatgggtcttcttagcccccatttatagctggggaaactgaggcccaggtgatcaggtgatacacagccatgaataacagagccaggcctgtaccctcctgcggatgctcaatctggggcctattcctgatgcactgtagccatgcccaggtgagaggcaaagatccacatgccattctctgggctgccagtctagtgatcatctttaccaggccagaggcatttcctgagaccacacctcgggaactcctccagccccaggcctgcatgtttagagattcagccttcattccacttctccactcccttcctcatctttggatgggacagcctgatcttcctctcccaggctttctgtcactgggcctcccagaagctccctccctggtgatgtctttcctgaggaggcttctgagacctgcccccatctggaaggttcagtggaagtaggaggtggctgcttctatcactgggtgcttgcagaagccggggtgcctcctaaagagcaggagggcctctgagtgtctctggttctcctcttgggacaaggccctggctccctgtggcctttgttgcctccagagcctgactggagctgtcttcaggagacaccagcggctgatcgtggcccctcgctgccagctaggccatggctgaatctagcagggcttcctcctcctcagagtggtctccctgaaaatatcccagtcctcctgaaagccccctccagacacagagtcagctctttctgggacccttacaccccaagatccagggctaagagtgccgctgggcatctgggagtgtgcagaacttggagagaggaggggaaaggagtcttccaccaacccacttcccaggcagctgctgaacaaatccagggacttaataggagccacacaaagcccttgagttgctccagagatcaagggtcagcctgaatacctcattaattaactgagcaaggcttcctgctattgacagggtctgggagctcagcctgggagaagaccttacatcccgcagcccgaagaccatctccacttcctcctcctttcctttctcccactcactggtgcccactggcctgttccatcctctgagcccagctttcccaggaggctgtggcctggcaggactgtgaaatgtgacccttccattttcaagcctgacccccaagttgtttccctgtcctctatccctgcccactcctcctccagtcctttctagcataatatccgatgctccaaggatccagcacaatctggctcccacacaccttcaaatgctgctcctggatgtctatcaccagggagaggatgtgacgagctgattcacaccgaggtgtcaggctgagggtgttggcagagtgggtgggtgggtggtgatttcgttccaataagggtcatgcgtgaactctaacagtataagttttaatgatgggacttcgagcatcaaagacaggccagacagcaggatattttgagcaaggagccctttcccgggacggctaaggtcatgaagtgggggtggcagcattctgtgctggtggctgaggctgtcctgtctctggagctctttttcccattagggctctgctttttctctgcagatgtgagtatctgctttggccacttccactgccatccctagcaccacccctgagttttccaggtgcacactagaactcttgcctctgggagttttctttgccctagtaaggatgtaccactagtggagatttccccatggtggggactggccttccattcaaatgttgctgaagagagggctccattatcacctttgggcttatgtggaaggagtactgcatggccaggtatttcacctcctggcatggaatgaggttcttcaacctgctatttttggggaccaacacataggagaccttgttacagtttgcagtatctctgttataacttgtagagctcatccctgccggctgacatttgtagagcctattgctgtttgcagagccagctgtttcttgaagggctcgtcactggctttagagcctgtgctgtttgtagagtctgttgtttgcagaaccgggcatcacatgcagagctcatcactatctgcaaagcttgctgccacttataaagtttctcggggtttgcagagcctgatactgcttacaaagctcattaaggtttgcagaacccatagcagtttgtggagcctgttgtttgcagagttactccttgcttgcagagttcttcgctggttttagaaccagttactctttgtagaatctattgtcttttgtagacgctaagcttgcaggctgagctcatcagtatccacaaagcttgttgctatctggagagcttggctctgcttgcagagccttcatttcttgcaaagcttgccttggtcagagaacttgctgctacttgtgagtctgacattgctttccgggctcatcgctgatgacagagccctgggacactttctgattctacctcctatgcctggactacctgccttgtggtgaattttcaaggatgtggggccataccacagggttttaaagtgttttcttgcgctcataggtttttggattgagctgctgagttcatgctccacatcattctctttggtcccagtttgtccccatgacactggctccatgcttagactcagtcatctctctaaagccaaaatgctctgtgttctctctctcccagagttaatggtctgtgtaggtaactctctcatctcttttgctcagagctcttgaacttccagtcagttacctgaattctcttcacctctgtctcagtaggatcttatgtccttccatctactcactctcttcttagcatggagtcctcacattttcataaccacagtcatccacaggattcatggatgtgatgtgctggaagtgggaggaatgaggactggacagcagtttgggtcacacatgagctcaactccatgaagctcacgtgtgacccaaactcctgtcacacatgagcctgtgggccatgtgaccttggcctcagagtctggagggatgcatgccgatcttcagcagctctgtcttgcagcttttgccttgggttggctgtgctcacactcagtggggagcgggtggaggtcttggcatttgttgtgcaaggttgtcgttggccattactggaacaccccaatctatcctcatagactttggacactcagcccctaacaacacaccaacttgttttttgtgtgtgtgtgaagatgctttcttctaaatacatacgtccttggaaggcagagtttgaatggcatgatgtgcagtttatcatattgaaagacttttcagaaaaccaaaaggaaaatcaaatagcaattcccaggtacttgttacaaaaacctagcagttcaaattctgaatggatgggcagtattggccaagggggaggaagtcgaaggaatagacccaatatcactggtgcttctttgggaagtttcctaagaatcaccatggccccagggctcgccatgtctgaacatgagtgggtctgtgtagagatcttaaccctaaaagtttctgtacttaggaagtctgtgatatgaaaactcaagtccagagatgatcacccactttatataaggagttattcaaataactccctggacacatttaaaatggaacacggtcctctctgtagtccaaccaggaacacagctcttatgctgagcgaggggttcctgaattacccttgtttcttttccaggaggttgcagctgaggacatcgtgcagcccaactactaacagtgatgaggtctggattttcctgactttctctgcttctgtgctatggaatggccagaagttcagcttgtggaacacagaatggtctgcaagcaaactctttcctctccttgaaatcttgctattcctgtcctttgttcttagaagaaactgagctctagatatgtctcactgttggctttgtccacagggccccaaggtaagcactgctgctcaggagataattcagagtgctaatggcatacagatgcatgcgaattcatgtgcacacacacaaattaggctgcaattatcacaggaactatttgctaatgctggttaccatttgaaccattactcaacactggttcccacagaagtctggtcactgtggctcagcatgaggcctgcctctctggcagtcttggaaacttggcatcaacaccaagtaacagctgtgggttgattggatgtgggaggtgggtctcttaaggtttgctatgggaaaggaaaaaacctgctggaaaatgacactgagattccatcaagggaaggaaaaaccagcatcaaagacaaggaatgccatacaatacatcacatgctagtgtgggtggccaagagtgttattcacacagtgtgtccatttcactcaacagctcttccctgctgtctattgcatgcctgcggtatgagaggcttgggagaaggtatctaagacaggagccaccccacagaagcaactagttcaccacaggtgtggaggctgattccccattgagtcctatgggagttatcaagccccagggtggaggcagggcttgagatttgctgtcaagagtgccgtgttaatctgtgctcatgctgctaataaagacatacctaagactgggtaatttataaaggaaagaggtttaattgactggcagttcagcatggctggggaggcctcaggaaacttataatcatggtggaaggggaagcaaactcgttcttcaaatgtcagcagcaagaagtgctgagcagaagagggaaaagccccttataaaaccatcagatcttgtgagaactcattcactatcacaagaacagcatgaggggaaccgcccccatgattaaattacctcccaccaggtccctcccacaacgggtggggataatgggaactacaattcgagatgagatttgggtggggacacaaagcctaaccatatcagatggagtggattttagtgctggtgaaaggaggcaaggcatctcaggcagccagagctgtcctgctaagcaatgtggctgtacgccagaatggtcagtggtcaccgagtcccagcagtagcttctgctcagtgagtggctgccatttccccctcgtcttggcagccctgcaaaggaccgtattgtcatgctcattttgcagatatggaggtagaggccagtgcaggtaggagactagctacaaggccacatgggtgctctggttggattggaattagaagctgcgtatgtctgactgttggtgaggatgctgagaaggacaaggcatgattgggggaaaatgggagggtcatagtggtactgttgaaagagctcctgggaggaccaagtttatcttacccatgagggaaatgtggcacagagacagtaattgatacttggtctacagcaaatgggtggcagagcagaggagagtaggtgataagcttcaccccaccgtgagccctgctgactccctggagcaccctgagagctcagcagaggtaggaggatgatctgggggttgcccctgtatccatttgcccacccctgacccagaaaggcctctctggcattgcctggaggtctcgagcagggaaaaggagaagctagcatcacggtctcctgggggtattcagtagcctccagagagcagtttgtccagcttccctttaggcagcaagctgggcttcccattggtgactcctggtgccacatctcctctcctcacccttgtgtctgctcctccggaggcctttctgtctggctgtctgtccacaggccctgcaggcattgtccgatttttctcccaatccttccctggtggatgcaccctgagatctctgagctgccagctaggcaggctcctagccaccagagattggagtcaacagtggggttgtcagcatccatgagtcgctgttgcagtaggtgctgacatctactcttctatgttgaagtgagagctggggccctcatgtttgctgggagaggggagtagggttgttggaagatgcttgctagggccatgaagggaagtaaaagggcagtgtgcatgatagatagacaagatttgacttattcaaacttgtccaacccctggcccagcacaaatttgcaaactttcttaaaacattatgaggttttttttttttgcgatttttttcttttggctcatcagctatcattagtgttagtgtattttaggtgtggcccaagacaattattcttcttccaatgtggcccagggaagccaaaagattgggcacccttgttttagataatgcaaggtgtaccatgtgtaagagccatttgaaatgcctgagttctctgttgagcactctgtggacctgcactctgggggaacacaggagaagacacagctcttgtcctcagggagctccttttccagaagacacaatgaatgcacagaagtccctagagaaccttctccatgaggacagggtctgatgtgatttgtagatgcaaattggaaatgtggcggccctagttcaaaaatgattaagaatttcaagatgatgactgcagagcattaacccaagtgaggggccctcctgagagttcagagctttgtgtgactgagcctcacatgtccatggcagcgggcatggctgcaccaggcctggctgcagcaggtcagagaaccaagagcccaggcaactccccagagcccttgctgggccctcagaggcacccgacatatttgtggactgtgtcaggtaattcacaaaaaactctttaagatctctcatttcatggggtccctaccaaaccccgtgatcaactttgaaatgattcttcccaatttccagaagtgtatctcaaggcctagagagattaaactgtcttcctagggtcacaaaggaagctataattggaagtggaaacagaagtctttggacctgggccaaagggtcctgcctgcccctgttccctcctggaccctacgatgccagccctccaggactgcagtgccttcacccagttgggcctgagatctttctttggagggagttttccagggcaatgaccactcttattgtcactgctcctctccagccccaaccttgctcagtgggtcccagctcctggcctgcggcgtccaggccctctaaacactcctgtcaacctggaggttttttttcttacctttgtgggtgttttctaatctgtccccacccaactgagtgtgacattttacagtcatattcctacctcctggcagggccatccagggctgctaatgaggccttccttggtttatggtaatggcgccctcctgtcccctctccctcatgaagtataccacacctgccacccgcagactcccaggcccctcctcctgaccccgaactcaggctgccctccctgaaaggcccccagccttgtggcgtatttacagaaatgccacacagcagaacaccccaaatcaaatgaacggtaacgggaaagctgctagcttctaaattagcggtgcataattagtttcatgcataaacctctggaaagcacggggctcgggctggtgagagagacaattagtttttgcaaggatgaagaagaagagcagaaaaggagtgaaggaaggcaggaaggttggctggagaggggtctgggctgagtgaaatgtagatcgcatctgtacagccaagctccacacactgcctttctatctgggaggcctttctgatgcctccagctcagggctcttaaagactcccatcgatgcctagcctctcccctcccactgttctggctgcagaatgactcaggcagccctttctaggcccctggctggggctgcatggtgggacacttggaccatatgtgagccctcaggggagacatcagagctttgtccatttctgtcccatgactcaggactctgcctggggtgggcttgggtgccctggctggcctgctgttttgggtgtggaggtgtgtttctcagacaggctggctgagaatcacagcctttgaatctcggagcccctggcactctgtgggtcatggagcagccctgccaggggaggcatctcacagatggggagtggagaagcccaaattttagcctgccctggctggttcacagggagcaagggccacagtgctatcttcagacttctaaactcagccagtttggcccacccacactggcaatgctgcccgaaaggagacagaggaagaaagtccacgctgatgttctcagatgttctcccgggataactacttccttgtgtgcaatctcagcaaatggacaggtctgtgaggagtctccttgggtctcctgactcctcaggatgctgccatgtgctggatcaccattatcctgcttccgggaaagtctcttaacctccacaggccttacttagtttcctcacctatcaattaaagagggcaattcctgtcaaccttcctccaggctctgggacggccagtgtcttcaggttggggagatgccttaggaaagctctttgcatggaggcctgcaatctttattgcttattatatattatttatttagtcttaatttacaattgcttgatttccagaggatcttagtgccatggggacagaaatgtgctgcccagtcctcaataaagaatgcttttcctgccataaataaacagaatatccaatcaaccacccatcagattgcctggccctggcacaaacagaatgtcactaatgagacacaacacgcattagcttaatgctcttccaggggaagaaagctggccctgagtgccagccgggttatggtggaagatgggaatgggcagcctccatgtggacactgggggagggctctgtgtaccagcacctcaaaggccactgggcaaccctcagagagctgaggtttgtctcagtggggtcactgctgcaggtctgctttgcttgaagacagtgggggttgactgtgggcccactgtgtgcccagagctgggatggctctgtgggtaccatcagaggagtctgtgtaggttcagggagataaaattcataatataaaacagagtgcaatgtggattggagcactgagcaaaaataatgtggttatgcagtaagtgtaatggaagggaattggtatgcatggggtagtcaagaaaggctgcatggaggaggaagacatgaacacctccttcaaggacaagcaagaattggggcaggggatgcattcagatgagagccacaacatgggcacaggaaggaaaagagagctcagtatgctggcagcagaatcatgggagcccagaagctggggttaggaatctgggctttgtttgatagcaccagggagccatggagggtcctggagtgctggcagagtcaaaggccactgtggaccacatttaaccgggttccttcttcagctcgcctctgccatccccctttctaggccagctgggatgaggctccacaaggggccagctaagtcgcgcctgctctttctgtctgctcttgatcactgtcagctgcctaaagccaagcgcgagacagcagccctccccagcggagctgagctccctgaagataagatgaatgtctgcaggccacagagctgagatgttccgaaggaagtggaagaggaggaagaaggaataaacacccatcacattaataagagtttgggagaagtgaggggctgaggccaggagtctccagatggtgtttagtgaagtgacagtttgatgcctaaaaggaaaaatggaactgtggtatgctgggagcttcgatcttcatggggtgggggtggggatgtgggcgcatgaaacctggtgtgaggtctgtacttatacaagcctgaccagagcccattctaggtcccagcagaaagggcagacaacttccaggatgtctgcttagggactcccacaaagtgggtctggtcccaagggttcatgtacccatgcagccacccacagcatttcaatagcctcacagctactgagaacttaggaggtcagccttgtgccaatgctgggtccacatgaataagtaggacccagtccctgccctcaaagagagcacagtctagggtggagcagtcatgttaaactctggtaaactgaggtaggcataggaaattctaggcatgcaggagagggcatcttatccagccttatccagattggggaaggctccctggagaaggtggcatgtgagctgagtttggaatgctggccaaggactgacctgctggaaggagcttggggcggacataggaggatgccaggcaaaggaaactagtggagccactcagcgggtgtggagccacatgctcacgggtgggggagtcagaagccagtgtcgtcccagatcctgaggtcagagtgggaggcggtggggattggggaggagctaatgatcacaagatgagtgactgagtcagtgaagggtattcaggagtgtgagtctcagacccccacctgatcccatcccttgtcactatacgggtcattatggggtatcagaaagctactctggttaaaacattctccctgccctgcctagtacactgcctgacattccacatcagagtgccctccttttaggttaaatagagtacttctaccatctgtccttgttacaggacaggtaacttgttagcaggcactttctctgctctcacctggggagaacagagatcccagagggcaagaggccatttctgggatgcaggccatgtctggaactcggccttgaccatcctgcacatgggctggggcaactccacagcagggagttttggacaccgccagaagaagggcggtggctttacttgttagcaatgggagccacgcacttgggaaagtcgggcagagtcaatggccacgtggaccaggctgaggatgaggtggcacagaggatggtattgggtggagcccacaggggagcaggcagaggagggcagtggagagaaaaaggagagagcaagggaaggagagtcaaagaggagtcccagccttcagaatccattctgtttccatttcccccaagtcacacagctgccagagttcagacagatgctgtgattagcattttaatgcatttcagaggaccttgtccaaactgctctggaaatcagaaatcaagagtttatcttcagctgtccctaaagagctacattctctttcaattccaaaggagtctgagaaagtgtgtgtacctgtgtgttcgtgtgcccacatgtggacatgtgtaggatgtcatgtgcctctcccatgtgtgttatatgttcacatcacctgttatgtacacatacttttgtgtgcacctatatggcatgtactctgttgtgtgtatgtgcgtgcatgtgtgtgtgtttgagtgatgagtgtgcagctgcatctgtatgtgcgcaagtacatcttgcacgtgtgtgcatattctacatgggcctttgcaagtacaattttatccaggatcgttcatgtggaagagggagagctccatgctagttgaaaacaggtcagtactaagtgactcgggctgtcagggggcctgggccttagaaaatgggaaatgcatttcaaatgcgtctttggttgcttggcctgatcctgaagctgtgtttcaaacaatgcagctcaacggtatttcaagcaaagtgcatttctggagtaataattccactcccattgaacagtgctggcctcagaggcctagcctctgtgagggtttctggagctccagaagaaggttggggcagctactagtgggtcagggccatggcagggcaggggttgggaagccaggaggctctcaggacatctgtgtggggtgagtcccctctacctgcctcccaagattctcctcctgccacctcaagctggccacacctatatctgccaaggctgttttctggaagatggatgacatcagtcattcaactagcttcaggaggaaggatttccttctcctgttgtgttagtccattctcacactgctataaagacatacctgagactgggtaatttatcaagaaaagaggtttaattgacttacagttctgcatggctggggaggcctcaggaaacttacaatcatggtggcaggcaagcagaggcaaaggtacatcttacatggcagcaggggagagagagcgaatgagcaaaggaggaagagccccttgtaaaaccatcagatcttgtgagaactcactcactatcacgagaacagcatgggggaaaccacatccatgatccaatcatctcctactaggtcccactcttgacacgtggggattatgggtattataatttgagatgagatttgggtggggacacagagccaaaccatatcacctgtcctggccaccttctctggacatacttctctaaaagtgtagcactcagttccagactcagatttcctggggccatcttcccagcctagggaaagtgggatcatcactttccttctttagagggaggtacctgttaactgcaagactgtgtcaacttttagggagcagggcaacaccattggctcctttggagtctggggccaactaaaatctaatctttaacccttgcctgacttgcttaccccttcgtgtcatgacggcaggggcatctacttgtagctgcatggggctcctcagagtcattctctgctcctcctgtatggcacagacagtgatgtggagttgggggatgcatctgctgggagggggccggggaagcagcagacagttccatgtgaatttgtttaatgtaaatacatcctctatttatctttggctgttaataaattcatgcattattagaaaatccctcataccagcagacccgctgagttagatcagttcgttttaagagatttcctgttggcaggattcaaagcccacacctgcagccggcccaggcacaaggatttaactaaacgccacagataattagatcagttaaccttgcaaattaaaacaagcacatcgcattagctcagtttatcctaaaagaaaatattaagttcccccagataaatcgtttaataagaatagaagaagatggcacatactgtcttctcagaacctctgggcaggagtgagggagggctcaaacagtggccagatagcgggttttcttccattgatttatctatcagtgatggatcaggttcttgcccactgacttaacaggagttagaagagtttgaggaacatccaggcacggtgcaggctggagcacgcaaaccaacagcaaagctccatggggtctgagagtactaaggggcatcagtgggaggtagcccacctcgccacttcataacgcaggacagcccccagtgaatccctgggggatggccagagaatgagggttcaagcccatcaggaaaggctttctgcaagaactatgaccctctgtgccttggccaccagaagttcattgcatctgttagatactgaatacttaaggagttcgctgaagtctttgtagatttcaatgctaccgagtcagaatagagggtaatttggactttaggtgtaaagttggcctttgaaaaatctatcaaaaattttgattggcaaataagcagtgtagacgaagttctatgtgcaggaatatgttgtcaacctaagaccagtgtttgcaagtggcttacgaatcctctgtgtcacttcatcactgtgctagttacacaggctttgcatctgttcattaaagcagtgttggacattaacttggaagcactgttgggttgtctactcaaaagtaataaaacttcactgagcacaccccataatatggatgctaatggaaatgggtgtcctccccaggtcttctgaattagggtaggtttacttggtcatcaatcatggagccttttcaagataaaggccatgttgcaaatgagaacagacccaaatgtggcatcccagcagcgctgtgtccaactgtctaggcaagtgatgcttatgtcccttcccactccacttttctgaggttctctgaccctcaggagggaaacataattgcagagtggggccctcctcatggatcaaactcttctagcccaagaggaggaatcagtattttctgacaatgctggacaaagaatagaggagcacacagggtttctgaagctggaggagcagtgaaatcacccagggagcatttgcaacacatggatcccaggcagatcctgactcttcatgactctgtgtgtgtgtgtgtgtgtgtgtgtgtgtgtgtgtgtgtgtgtgtgtgtgtgacagagagagagagagagagagagagagagaggtggagcctctttctttacatttattataaatctgaatgtcaaagaaatccctacgtgtggtagtgagatgaggtggtttggaaacctctccagcactgcgtagcctgccctgaatggagactttctcattcaggtgcaacaagtgttcaagtggtcagggcaatgccctcaccagcttcagggcagagagggagccaagtttcccttcagccctccaccagcaggacttgcccgaaaccaagtgagtagctcctgccagcctgtgcccattgaggctgctcctggaaagggggactgaggcaggctctccactggcctcagctcctgttcctgatgtcacttcctcacctcagtcctctcatcaggactggcacaggccttcaccatccagaccatgctatgtaccatgtggaggtggacactctcctactcaggaagcttcatgagctcccaagaacccaaaggaaagggaacaagctcctcagtgggatgtgaaaggccttcccaactcatgctaagtcccgtccccaagcccttcctgaactccagccagcgccccctgtcctctccctcctccttgcctttgcccctgctgtcacctcactggagtgacatctggagccccctccatccacctagatcctgccgatcttgcccaggcagtgtgacactcagtgagcagtcctgcctggaagcgctcccaaaccactcccagctctaaattgcagtctggagtctcgatccattgtcctctaattgcttggcatgtacatcttctctcctccgcaggagggaagccccaggggcagcagggttcttgccctctactcacttccacctgccaagcagcacctagcgcggggctatgctcctggtgggtgctcaggaaacacttactgaattgaattacaaaccttctcccaggctctgagccgttccagctgctggatgccagctgtcagggctgctgggagaggctgaatgcatattcatttcagaccctctgtctctcggccttgaagggcctcctggaccatcttaatccatgagggtgtccagggcatgactctgctcctgctctccctggttagggttttcaatcttctgggttgtgctcacccagattccaggggtgctgctgtgttttggagtgaagaatggtgaacagggagtggagaaggaggtatgatgtaggcctcatgtgggggattgtgcaaaccatgaagacaaacttaacaaacacctcttgtgggggcatgaaggtggtgatcttgagccctcctcttccagcacagccaggccttggcagggccagctccagcgtccttatggacctgcctgccactctcacagtggtttccattcagcgtggtagggtttgttggcccctccctgcggccagccctgcactaggctataaagctgggaggtttgctgctacgcatcctgcgttggctgccctccagacctgggcagccaggggccggggatggatcagaaggggccaggtaggaagattcactcctttcttggagacagaatcactgaagcaagagtggcagctgtagagaaactgtcattgtgcacatttcctgtgtgcaagagcagcagggtgtttggagctttgcatgcttcatgctatccataaactgctcctggatgaaagaactactggcaccccagggctgagatgagaaaactgaggcacagagaagttaagtgattagcccaaggtcacacagctcagagtggtggagctgggattggaggctaggttgttaaatttaaggcatgagcctgcccagcggcatggagggtttcgcctctaaggcctgaaggtcttcagagaagggagaaattgggaggcctgaaggagaaatgaggattactccaggctagaggctagggaatttgggacctagccaaactggctggggctgaggactgggactggttctatgcgggcatttatgatggttaagctagtaaaacttaagataaaatcatgggatcttaactcgccccccagaactgatttggtccaatgttggaattacctgcatcaacccccgaaccctgcgactcagcctgcttgaacatgtctgtgaccagaggctcactaccttgtgggacagcccaggccactggcagaggctatgagggagggcctcaggagtagagggcagcacaggccagcccgtgctatccctggtcccctccttcctggctctcagccatgctgaagtttaccaggaaggtcaatccgagcaggctttgcacagagcacccctacctcaccccacacccctttacaaaagaggtcctgcttcagtctctgaaaataaagttggtgccattgctgctggccctgaaagccggccgacccactttcagagggtgtgagaccactggtgcaactgtcaaaaaagtgggagtgaggaattgcctgtggaatgcctgtgatgtggcacagctgtctgctggcgtggcagcctttgattcttcaatatttaagccacacacaaaggcacagaagggcacaaactcgagaaagacacagaggacgcaaatatgctacctaagggtagctgaaattttattcccttcccccttatgaatctcacagaattggaaaccatgtcagtagctggaataaacatgcagagttagcagtgctgcatgaagaagctcctcttgtccacaccctaagactgctttcttgactcagcatcctcatggaagcatcagggtgtgatctaagctgaaggcaaatgcggcacgtgtgtggggggtggctgctgctccagccagcttgctcttctgtaacccctgaccatctccaccaggctgtgtgagggtagactcttccaggtcccaccaatattatccggcccttctccttcactgaagaagcacagatttgttcatggaagacatgtgcatagtctttggcaagatatcctctttcccagacttccttgcagctagggtggccctgtgacatagctctggccaatgagacatacttagatgtctcctggagaggggacctcttggaaaccttttgcattcccgatagaagggacagaggcagctggacctgctctgcttgatgacagatgcaatgccctccgacagcagtgagaaggactctgttacgttgttgctgttgcatggttatgttgctgaagcaacacgaggccccagactctgtgatgtgcaaaaaacccaaagtgttatttgttgaggccactgcagccaaatgaatttctaagtggaagggtggccacttagaaattacaattcagagaggttaaatggcttcccaagggcacacagtaaggctccaggcagagctggggatggaatcagactctgccttccattcagaacaggacttctccaatgcagaggtaggccaggtgtgtggtgacacctcgagggccactgccctgccccacagggccccctgggtgtctagcaatcatgccagagtctcctgccagaagaacctggtgtgtggccttggggtgacggggacggttcctgccctcatgcagctctggctttccacagggttagtgccctaggatgaggaggaaggagcatgggctctggcgccagatctctccatggttttctggtctgagcaagcccctttgcctcagtttcctcttccatacaatagcactaataaggcctggttaagacctgggtgatgctgtcttaaataaatgagataatatttgtgaagtgtctggctgtagcgagtacacagtgattggtagctgtcatcggagttagagagacaagattctttgatctgctctcttatttgggatgatgccacaaggctcaatctgcagtagatgtaggtggtgtcctgcccatgaccccttctcttccccacctcagtgacagtgggttgacttccaactgccagcaccagcacttccagctcgagggcttcctttgactgtggagcccactttgcccacgcatgcagcaagccagaaaagctagaaagcggaagacccctgggcacaacctcggccacagcctggtggaaattggtgcatgaataccccagttctctggccccttgggtgggatgactccaaggagtatgattgacattggctctagagtcccagtggggttcagcaacacccgcagtggaagctggtctgcctgataagacaccccttattgatttcctctcttccttgtctccactattgacccaagttcctggggtcaaccccacaaagaagctatttgcactcaaatgcttgtctacagtctgcttctgggggcgctccaactaagacaatatcctttaaagcctaacattaggccagtggtggttgaacttcttgtgcccacgaatctcctagggatcttgttaaagggtggtggctgctgtttgagtgacatggctcagatgatctagagtaagctcaagactctgcatttctaacagaccccagtgatgctgatctgatgtccacattttagccagggcttagacttccggtgctgttgacctgcagaggctcaggcaagggcgagatcagtgttggttagagcaacctagaggagcatcacagaggaagggagcttggggctaggtcctgatgccctgggaggattctggtgggtaggctgggaggaggcaggtcctttctagggagcggggaagctggagacttgctggggcctgaagccatgcccagcacctgcaggatttcagagcaactgatctgcatggagttgattggagcctacaggctgtaaggggctagaggctctgaagcacagcagtgtgagaaaagcctcctccatctccagacacattttccctgttctcactcccaattccaggaggaaaattcacactgacctggctccccaagccttcctcctcttactcatttctcgagttcctctccctttacatacacaaccaacttctgtcctccccactccatggagtcctttcggggcatcccagctctcttctgaaatataatgggacatatggtccaaactgcatacttgagccattctatatttttattatcctcttaattatttcatctgtgaattaggagtcacaggactttattgtggcaaaggactccgaaggtcatccccactcgcatcattgttttgtcattaataatacaacttggatgatttctagcaatccacagcatataaagggcgcacacatgtgattttcatgatagaaattagggaactcagacctggaaaggttgggtggatgccccaagttggttggtgtcctctgcacaggctgacagtgttctgaagggtggagccgagtgttcggcatcattttgcctcttctgtgctgggcacagggttgggcacaccaggctcaccattaaacacactgtgctccttcagccaccagaaggggatgccacccacatggcgccccctggtgggctcatgggaacataccacaaatgcctttgattaaaaaaaagggtgcttgaaccacagtaaactacggcgccctagagagaccttatctcccctgcactccagccctttcctctttacaacagccgttttcatgaggaattaaagaataaagaacaatgccatttttttctattatcacccaggcttgcccatttttgatggcatgtggcagcccacagttccggatccctgcaggtcaacaacaaagacgtgtccttctgctcgcccacacacatgcgcccagcagaaaccctccaatcctaaaacacatccatcccggagcaggagctcacacagacattctgtttctcagcctcgttttctggcgaaaggtcaacaaaccctttgcagcctcacacggattcatgcaggcacagcccttgtggcagcctcacattctcgctccggtggacacacacctcgctccacacatgcccacattcacacctgcaccggcggcgaatgcctgggccaaagcaccttccacacagcacttcctttctacatccatgaccagagagcgaagctttctcctctttccaaatgcacccccgcagggtgagctaggctgaagactttctggaggggcatagaggtgatatggctggaataggagatgccagaatgatctgttggtgcctctggaaatgccaaggccagcaaggtcgctcagcagatggggagctgcctccctcccgcccatccttgctctgggtcagttccaggcacaggcgcagaaagaggaaagcaggtacaggctgggaatccaagatgggaactctggagttaatggagcagcctgggccccaagggcagtgctgggtgcttggatggggacggattggaaagctccccgagcggggcagagaatttgttcagaggaagtgatgttgactttgggcctccaaggatgaatggaaactctccaggcagagggaatgacatggaaaaagaggagcttgcaggaaggctacgtgcatctggagggtttgtggccaggatggtgtctgccctggctgaatcttgtgggtgacagaagcctgggtggtttgcaggtggtgggacctttattttacaatgacacccttggccagcctctgaagaatgcatcagaggggtgagggcctggaagcagaaggccactgtggtggtgtgggctcctgcagggcatgttggcttatcctgccatctctctcatctgaactcctgggcacttcccttcactaccatttttggggcccctaaagatattttctggatcatgagctgtcttcacacttgcctcccaaaccagattataaactccttctgcaacaggccgtgtcttacttatttttgtccgatgccagacaccctccctcccacaaccaaacttcgcagggggcaggctatctgtaaacgctgctgccgctgacttgggtgatggcagccgtgatccaagccacattggggcagtgtgaaaattgcaaaatgcctgtctggtgtccttagaatgagacctgagcagagggcaggggtgggggtaccatcaggaatccagccccagccctggggagcaggcagtctggctgctctgcgtcagggagagacatatctgacccacgctttattatacttgtcaccaatggcgtcgggtagtggagagcaggagacactgtcgtccttgctctccccctctcctctcctctccctgttgtcttaagtaatgtgagtaatgctgagctcattattcttagaaatataaagaaagctggaagggtcttgagaggcgatctggcccaccgcctccttcacagtctagatggtgtgtccagggagggtccgggctcattgctctgcccagaccacgtggcttgttggtggcaggctggacctggcccaggttccctctgcttattatctcatgtgccctcttgtttgtttatttccttcaagtcatgtatgatgactgcaggcacagaggttctctggttctttcagatcaacttgttagggagcctttctgggcacagcccatggcaggcctggactatgtcgtgggggccactgagaagatgaggcccctatgagagtcaagagtcacttgcttgaaaaatgtggaaccctcaggacagtggttggggcagggaaggagaaagtgggccgtctaggagggaagactgtgggcacagccccagggagaaggaggactttgagatgtctctgtggggaggagattgaaaagattttgcatgaacacagtgggacagggggctgggctaagggataacgtggaagagcagaggcaagtttcgaaggcatcacagatgtagcccctatacccatctgtccctcagtacctggatttaaagtgctttgggcttctctcttggaaccttggtgttcccttctgtataatgagcccaggctggtgttctgtggtgaaggtcctgtttggctggaaagcctggctagggcacatgcctgccaagcaggtttgctgttgggatgggggctcttctgaaggtatgggctggagaaatgccccacatgagtgggtctcaaggcctgggttctggtcccagctctgttatagcaaagtctccattcacctaacccaggagagagttgagctggagtcggtgctgaaactgctaagcccttgggtcaagtctgccctgcagacgtgggtgcatgtgaacggcaggcgacaaatgatccttaatgcccggaggtggactctgccctctgctcctgcccgtactccccacctacccggtgctcacaccattggagcttttgcctcttcacaagtcatccctcttgtaacactctaaggacctttgggcttgttccctgaatgaatgagaaccagcaagtaagggaggaacgctctgccccagggcctcactgtcccaccttctacccaccctaggcccgggatggggtttctctaccttggcattgttgacacttggggccagatgatgttttgctgtgggactgtcctgtacattgtaggatatttagcggcagccctggcctctacccattagatgccagtagcatctccaatgtcaaatgtcccccgcagggcaaaattgagagccactgccctaaaaggacagatgagtacttcttttcagggaatatgagaaagaagaaagatatatcatccattctcccaaagagaaagaaaaaagcatgaatccaggtgagatacagaggaaaggctgggcgacccccatgactcagacactattgtaggcctttatcctccctactgtggaagagccacagggcagcccctttctcagtgttatgagttgaattgtgttcccctcacaagatgctgaagtcctaaccccaggacccatgaaagtgaccttctttgaaatagggtctttgcagatgatcaagttaagacgaggtcattagggcaggccctaacgcgatatgactgctgtcttcataaaaaggagaagtctggacacagacaatgtacattggaaagatgatgcaaagacacagagggaacgccatctacaactgaggaatgtctgaggctcccagaagcgaggagagaggcctggaactgattctccctcacagccctcagaaagaaccaactctgccaacaccttgatttgggactgccagcctccagaactgcgagacaatacatttccgttgtttaagccacccaatttgtggtgctttgttgcagcagtcccatgctaatacactcagcaagaggaagaacaggaccggggaactggaagagtgtgtggatctggctgagatgatctctgcagagaaacagaaggtggcaggggctgggagggaagatgcaggtgctgatgggacccagactcactgttcagagacaaaaaccaacactgtgcctacaggacaaacaagtggaaatacatcccatttctaaaatgaaaagctttgattgcaccgatcactagaaattgtaaaactaccccgaagaattaacagcctccatacatgctaactacatccatcataaattcgtctttagtttctgttatcatatcactgtctctggggacccctgtcttgtcatcatttgccctttataatttattcatcttgttcttgccttcatcctttctacttatcattcatctttacagttgtacataaaattagatggatccctcaatggcaggactgtcagggagggagatgggccttgccagggaagcccccgtatggtgatgggggccccaccagagcctcctgtggatgtcagggttgaggtggggtgggccaaagttgaaagagggagggaggagagggaaaggagagacaagtctgaaggataaaagaagaaagtgttggtgagagagatagaggaaaatgggcagagggagagaagagaggagaaaatgggggcacaaagagaagaaagaaaaagaaaaagaaagaaaggaggaggaaatgggattaagaaagagaaaagtgagaagaagggatagaaaggagagacagtctgagatagcggtgctagaaatccatttgagctctctgaaaagaattttcccactttaacatctttcctggtaaactcaaagaaggtcacattgaatttccatggaagtgacccatcctgagtcgcggtgacctgagtcaggaggcgtgatggcgggactctgcatgtctgccaggctgacgcgaggggaggggaagggggagacagcagggaggagtgtgttagtttgctttgtattctaggattgttggaatgaggacacaaaagccaatctttgactagtgagttggaactttaatgtttaccaaggagatacagctcccacttcccccacccccatccctgaccagctctaattcccactgcttccttgcctcctactggctggacccagctcttcccctgccagccctggtgagaagccctttctgctaccaaaggagcaaaagtgctggccacagcttgtcatagcacctggttttctctcatctgagcatctcccttgagaccctgtattcccaaccttggaaacagaagggctcttcctggaagacgattccccacaaagtcccaatggctggaggagctgcgacaaagcttcaggggtagattttaaggaacagacttctttcaagaggcttcctgtgcacactcaggccccaggtggttctcagagtgggcctctcctgccctgtgtgagtcacctggctcctggcctgttgtgtgtgcctcgactctgggccgtttctcggaccagtgctcccatctgactcattttactcccaccctacccatatcctgaatgaaaactttgagtcactcctgcactccatggtcatcctggttctctctaaattcctaaagcaaccggtggcactggcagaggcaggtatcctgagctttggtagcagactcagtgctggtcctggctcggccacttatcaattttgtgaccttgggcaaacctcgatctcctcctctgtgagggataatcatgacatcttcttcatagcgtagttttgaagataaaatgaggcaatgtaggtaaagtgcttggcatcatgcctgtcatatagtaagcacttaaaaatactgtgattattgaacaattgtccacactacccattttatagtaacatgtgctgtcttgtattgttgactatgtagatatttgtgtgtgtgtgtggcttccatccccaacttggtggtcaactccaagcggggaggtggatgtgtttttcttatctctgtattttacagaacgtctggcacacaggaaatacttgttgatggattgagaaactgccccatgttgactgtcccctgtgaatagtgaaacaaattttgtgaatagaggagcatgggcaggaaaagaacaggaagtcaggaaagagtgagatcaagagtatgagggcgagagaggcagagagattagaaaaagggagtcactctgcctggattctggcagaaggcagtgctcaaaaagacccagatgaagcttcatagtttaataatctaattctactaaaacatgccaaactcaaaaataataatccatttgtgccactggtccagggatgactccatcagccatcagagggccctgctcaggctggttcccagggatactgggaatcacgtatcactgatttgtaagaacagccactgtggtctggtttctgagcttccactgatcccaagagaaatgtcagcttcccttttcaggcctccaatgaagacatgtgctaggggtgcctctagttctgtctctgtcattttgttattgttgctcatagtgacggtggtggtgtgtgtgtatgacagcaatgggattatttttcttgctggcaacaggatgcgagctccataactcactagaaacagcatagactgcctgtactatcttttctcctctttctctcctcagcgagaaagtggagggctgattttaatggattgattttaatggattttgaagtctggaaaagtgcctaaattgctgaggttaccagttttccaggttcttttttttcaatttcattctctttagtcagacatagagtgtgcttgctggggcacctagtgtggtcaccccagacaagaagaagtccccctctgtctctcaccgaaacaggcagccatgaacacagccacagctggcaggatcgcctattatttggttgggtgagagcatttggcttggtcccgtccctgcatttgctagtggcacactttctctgatctcaaaggagagaaccaaccaacagcaataacaccaggtctgctttctggaatcaaaacaactctactttaaagaataattttacttggtcattttgtgtttcatttgtctgcatgcaggtttgtgtggagacaatgtgccctcggaacttcgagctgcaatccggtcttttattcctgcccctccctctggtgggcgtgcctgccccgagaattgtttgatgaggtttttgaggccatgagtttccctgtgaagcctttgaagaagggatggtgttcgaggggactctaggctatgtttcagctctgctgttggcctctatctatcttcccccctccccgtcccaacatacactcacgtttctttttgccctttccctcagacttactcaacttgtctttgtgatttcagaaaaatgccactggatctcccagtatgaaggattagcacagattatggggaacagtgttaattatgggtggaaagggggctggcgcgtcgctccaatgtgctcctgatttcccctgggcctttctgcctggtaataagccttctttaatctggcaggccccttggtgaaatcagcaccacggacagtgatattgattgcttctgagaaaccatcacagctgctcaaccaaattacctttgatatgtgacctttaatgtaattactgcaacatcaaagtatttctataaattattaaagaactaatacactccatcatttagctattctattatatgtaaaataaacaaccacaagttaatgttagatcctcaacaatccacacttgctactgaaatactcccaattcccagcctctcccctttcaaaatcctaaacctccccctctcaccttctctctttctgtttccccttctgattccggcttttagccaccatgaaactccctagcaatctctctcaagctgatgaagggcctcccataacaatgtggtattttctattccatttgggtggctctaaaatatctgtcacagtctcccccaaaacaaagtaccataaacactttattaatcagcacaaacctttctcagaagcctttgattatcctacaatatggctttatgcttcacacataacatggggcgatgtgaggcatatttctgccgtcttacagagggcacccagaaagtaattactataatatatgtgcatgtagccgcgcaactgaaaaaacaactggggaatggccaccctgccagagctgggcttcacacaaaatctgtgcggtgctcgatttccatatatttgcatctgtgggtatgttattaagatgactcagccccgtgctttgcaatcacaaataccaaaatacaatacaaaggctgtcttaatggaaggaaggccctgtgtaattcagctctccccacccctaaacgagtaaagaaagatcttcgatgcaaaggaaggctgcccccgcccggggttgcattttctctccgtctacctggttaacctttcccgctgtggggtagaaatggaaacgtgtgtttacatacggttggcttggtaagaatgtaaacatgcatgtgtaagcatgggtgtgcatacttatagaacacatgtgcttccctgcagtgtccattgtataagcgtcaacactatatttagaaaatctttaaattatgcccacaaacacacatctttccatttatccttagatactcagcagccgtatatctctcccccctcaccaccgccccatctctctgaacccacaggagagaccgcgcagacccttgacccgaagaatacttcttattttatggtgatgaactagcctcgataatagccatggctgatatcacacccagttaggggggccataaataattctcttctcccccgcacagaagctataaaccagggccgaggcgcgatagtttatcaaagacgagggctggctccttaaataaaccgcggtgatctcacttgcggcgccccctcccacgccggccccctcctcccccactagagcggcccgcgtcgactcgatgggcggactcgatcgcgcacgcggcccgcgggcccggcggaggcagctcccgctccggggacccgggacgcgccgctcccccgccccaggctgcccgcgcaggaacttcacggccacggccaagtggggcccctgtcccggatcccgttgggcccggacggccgagagcccagggatttgggggggcgcgcgggctcccgagctcaggcggggcggcgggcgccctgccgtcctctccccgcgcgccgcgccgccgcccggcctcccgaagtcgccccctgtcggcgcgtcggccgcttgcgccacggcgggcgccacttaccccgggcagagtcttctgctcgtgcagcgcgctctgggccttcagcgctgactcacgctcgcagtaggtgaggaaggcgcagcctggggaggaaagcaagcgccaagaagggtcagtggggcgcccccgggcccgccgacgcgccctgccgcccgccctccaggctcccgcccctccctgccgctcggtccctgtccccacctctctttctctcccgtgcactgttctcggagcttctctgcctctcggtgttcccggctgtctgcctctcgtacctccctttgcttttctattttgctccctccgcggagtctccccaccctgcatcttccccccaccacacccccctctccttacggttctctccttaccccgtaccctggtgcctcagacctctctgccctgtttcagcgccagcccctacgcttcctagaaggggcagcttccacccctcacccccagcacctctagccacacttgaccatgggctgtctttctggccggtaggagtgctgggcgctgctccctcagggatggtggagggctcctctaagccttacaaataaaggctcagtctgtaaggaggaccccaagccaggccctcctaataaaataaacgtaccctgtgtcccctgtcccaacccctgttgtttgatttgcagtgacagatggtcttcacacccctccaagtcagagggcttctagggcatatccaggccaccgacttacagcactagaccacccttgctctgcctttaattccctaggtgaccttaacaaatcacatcctctttctggcctcagtctccccacctgcgaactgagaaggctcagtctagctctcccactgattaattctaactgggccacaccccacctcctcgccagggaatccggatttgacagaagaatatactcaaggggtgacttttcagtgctgtcctttaggtgtggtgacaaggccaagagagtggggatgggggagtctttctgggagttcccataagctgtccagcatgcccagtgtcaggccttctttctctgcctgcagatgtggctgaaggtggcttgggaggcctgcaaggctcaaaaccatggggaaagcccaaaagctcactatggcggaagcaggcttgaatgttctggtgaacagtcacctcagaccttttcaagccacccatggccccagagaaggcaccctgtggaatggctgcctctcttgttcctctctctctcacgtgatcttatccaaggccacatccccaacaacctgtgttcccttctgcccccgcattcctctgctctcaccacctcctcacctggtatacccctcttccccatgttcacttctccgaaacccattgatctttcaagaatctgatcaagttctacctactccaggcagccctccttggctggtctagtccatccccagccagtctccacagccagccatttggtcattgccatggccatttatttcctgagtgctcgctctgtgccaggctctgtgccagacctcgtggcccaagccctcctctcatgaggcccacaggctgctggtgccagtatggtacctatgtcagcccttgtcaccaggcttgctttagactctggttgccggccacagaatgctcccggtgtcctctgcagctcctgactcttccaccaaccagcctgtacccagtgaaaacccctttcctccccttccaatgtagaaattcctgcctcccttccctttctggcttcagagaggaggtggaaagggaatgtatttgtgaaaggaacggagatgaaagaaggaaacagggagaaaagcctgggagacagaaactctcagctcccagtgccccctctgccttccccacctccaactcctgcctcaggcttggagaagcttcggagaaatctctctccctctctgtctcatgtctcccttcctccagaccccagatcactcctcctccctctcccgtcctcctccctcctggtcactggcagactgttattgatggagacacccggggactgaaatgaatagcggtcagaggcccccgtgacgtcgtccctcgtgctgccgcctgcttctcccgggggcgtctttcctcccgtccccttgttggccttgtcctctgcctgcaaccaggaggtggccactgcctctgctgtacgcaggcaagccagcttgggacaaggtcaggggcaggtttgaggggaggaggatgaggggagggaggaagaggaggaggagtaggaggaggaaatgaccatattgtttccatggcccaagataacaagaaaaggattccagaggaaaaagaatctgttgcttttgtccagcttccaggaatttctgccacagtttttgagagagctcacaactttattgtgaaccaaaatctttcaggatcctccagaccttgggtgacctccccctgccgtctccaccccctgaatttatctccttccagtcttcccctggccccactcactggtcccctcactacttcttagccccccaggtgcactctgtcttagggtctttgcactggtctttcctcttcccagaacggcacccccaccccacctctgctatcagcatggtgtgctccttcccttcactctggtttctgctcaaatgagacctcctcagagacacttcccttgaccaccccatttagcatagccctgcacccacacagaccctgaccccttttcctgtttccctttctgtttggcacccatcactccctgacagagtcacatatatttgctctttgaggggcaggctccccatgctcagatgaggttaggagcctggttttgttctgtttctgcttggttctcagtgtccagcatataagtggaggctaatacgtattccttgaaaggactgaatgccagaacacctcagctaatttggtggggccaataggcacagaaatggtgctcagaggctattgagagctgttcaagatctgtgggcactgaggcacactggacttctatagtggtggcagggccagaggttgcctgagagttgataagtgggttcctgatgggagggtttttgccccaagagctcccaggagcctgttgaacctgacagtgcactctcaccatgcttcccccttcacccccaagttgatcccagaaaagactgataaacaactgcagctcctgactcctccaccatccagcctgcacccagtgaaaacccctttcctccccttccaatgtagaaattcctcctgcctcccttcccttttcgggttcagagaggaggtggaaagggaatgtatttgtgaaaggaatggagatgaaagaaggaagcagtgagagaagcccaggagagccccttcccaggcagggcccaccccagcgtcctcatctgtaaaatgggaagagtaatggccctcagaagcttgtggggagacctacttgccagtgagtatgaacagcctctacagacttcactaagtgcagactgcagtgtcaatatcagttcactgttgtgaagcaggggctagagaggtgttgaagccccttccttctctccctctgcacctctgtgaggcgggagcggctggatatagaggctaactggggcagtcccaccccgggcccttcccagtccatctccagcccatccgatgcagcggctgacacgccagcatggcagattagttggctatcttaaggctctttgagaaaggcaaatgcggataagcagttattaacgctgactccggggttcaaaagaagggaccagtctgctccctggctgagggcagagccctgggggcatggtgactgtggggagggggctgcaggaggagaatttgccatcacagggtgctgtggatggtgagaggcctgtggtggagaatggggggccggggaagaaagggtgcccaagcctcagccattggacactcactgctctctcctagggagggaatgggggtgggacacatagaacccccagctagaacagctggccttgacttcctgtggctcatttccacatctcacaggggttgaggagggggctgtgggctgtgagggtgtccagctgaaaggggggaaggtggggagcatcagcctcagcccagcagccactaatctgccaaactcactctcctatgttgtactgagttgtccccagagacatccctggcggggccctttgggaactcacagttgaggtgggaaacgggattctctcaaggagcagctgcctaacaacacaagacagtgtgggagagaggctagaaccgggctctgaacgctgaggcttgagaaggtctgtggagggtgcctcatccttcctggggatgtggccagtggcacagaaatctctccccatcttcagacccagaaatccctcccaagtcctgatcctatgatccacatacactcgtgctcacagtggagtcggcaaggatccagtgtggctgcttggaatagcaaaaaaaaattaaaaaccacctaaatgtcccttaggacaggaatgctttcatttttaaactgtgaatactcaaaagcagttaaaaagatgaaaagaccctcaatgtaccagcatggaaagccacattgtcagatgggaaaagcaagttgtgaaataatagacgccatgtatatacaatggagacacaatcaactcgcccattatatactcagacctgtatttacatgtgaaagacaaagtctggaagtcacaccaaactgaaaacagggagtacggggtggggagtaggggggtatgtttcctatgactttcactttttttgttttgtttgacacatttagacccagaatgtattcatgtatcacttgcataattaacttgaaaggaaaaaaaaaatctttactaaaagagtaggatgaaatgaaaaggaggtgggtgagaataggtgagcccgacaggatgcagggcccatggcctgtattgaggagacaaagatcattgcacatctgccgcctggcaaatatacttcatgagggaaattatccttggtggggtggctgtggccctgcctcaaagcttcctctgagccggggctggctgctgcggtgctgggagttgacacaggtgctctcaactcagcaagctggaaatgtaaatgattctggttctttggccctgagttctgggggttggtgtttgggggatggaaaccatgatggtgcaaacacctccccgtctttgccctcccatttttggagggccctcccagctgtgcgactctgacgggacatgaggtagagccacccaagtgatccaggggctctctgggtggtctaggacctcaccctgagctgccccctttcctgccccactgtctgggatggttctcccggcaccagctcataatggagtctaccacccgttaggggtcagcgctttctgtcccacctcttcctgagttacgggatcaagcaggatagaagcgcagcctgttctggagcagagacagctttggaaatcatccaaggtggggtgggggcagagaggtgacagaactgcagggtgagaagtcacaccacagtgctgccctcagcagctgacacctgggctccctatggcaccctcttctcacccgagaggggccccatgcccacctcctctcctcacccgagagggatgccgtgcccacctcctctcctcacctgagagggacgccgtgcccacctcctctcctcacccgagaggacgccgtgcccacctcctctcctcacctgagagggacgccgtgcccacctcctctggccagcagagacctgcctgtcctctaatacttgagattctatcacatacgctgaacactttggccggcacacatgtttccttattcagccatgtcaccttctcccacttaccattattatttacttaatcccttccatttaccagcttgatgcctcgtctctgaatagactttcaattcagtgagggtggagacgggctcttctatgtctatacggctaagtggagggcccagctcctcattcaggggtctgcaagctggagaccaagagggactatgggggtgggggaaagagatccaagattggggcactgaagggagattgggaaaagttggcagagtgaggagggaagggagaaggagtgtgtggcaggagaggtgagcactgggccagggagaggcaggcagcgtgggcagcgggagggtgctgtcgggctagggtgcacgcaggggtggcggatgcccctctccgacatgggcagcgtgcagaccatggtgcaaggggtactgctgtggccaagaaggtgggcggtgccctctcccatgtggggggaaaacacagtgcagcagaattaattgcacggagatggcagtaatttacaaagcccccatgtgccgggataaaaggcccttgtcattgtgaagtgaaggaagtacaatttcctgcccaactctgaacagggccgaagcctggggtgtaatcatcacggaagggaaggttcccgatgtgatgctctccctcctcccaccccagctgggtcttgccttgctactaattgaattacagaattagccagaggaaggtggccctagaataggaaggtctggattttaataaaacatcagatcctttaggccttggacttggccggcctggaggaagtgggagaaagctgggcggtggggaatgggaaggtagcaggaggcccactagccagacctaggggccgaggaaggggctccctgaaggcccctctgccccaaatctccactcatccacctgccatggtgcctgaaatcacagcctgggagcatcactccttagtggtcctcacccccggctgcacctgagaatcacctggaagatttaaaaaacatgcaggccactgcagagaagttatagtagcatctctgggagtggatcgcaagagggagggagggaaagtccaccagcttccctgggaagagggttactgatgttctgaggtcacatctgttcccccatccaggctctgtctttcgtgctctgggtgggcaaagacagtcttcctggtaccttttgaagcagatgttctgctgccacgtgagagagaggcagctacagagcagctcatcatgtacatgttcttcctctgcaaatgtcctcccacttcgagtacccggctggagtctacacagcctttaagactcacttcttaggtcttactccaagctgaagccctgagcatctacctcagccactttggtctcaccttctatggattcgcatgtggcctctgcccatggcctgcctcaaggatgagcctcattttcttacctcaaccatgaacaacttgaggctgggcccttggggctcagcaggactgagtaacaggcgggaaaaagaccccatgggtctgtgcctctctctctgctcttctctgtgtgtccagccaaggttgaccctcctgccatcttcccaggaccttttctggccattcttgtttccctagttatttccacctggatcttcttccctctctcttcccactcctccaagtactccctgctggtattccaacaattcctgcagttgtcttctctccatgtgacacagtgattccccacccacataataaatttctgacttcctcttgcttctccacccccatggggtaaacccaagcctaagaacatcatcctttcctctgctgccttcccccatgcctcacccctttagagcccacgtaactttctaggagtgtctaagttttccttcctccaggaagccttccctgactacttcaaccccaacctctctcatagcccttggcaatggtctgtctcattttgcagttagaatcatacacgtctttgccttgcatttgtgtgtgttcacccagaatgtaaatactctattataggagtagctcaccccagggccccctttcccccagtggcagacagcgtagaatgcagagattgctgagctccattctgcctctggctgggtgagagtgagcggagtggcagcaggaagtggctgctgcagggatgcgggtgtgggggaggtgggccatggggtctggggaagtgaacacattgctcaggcccctggtagcaggagccatacgtcttcctcagaggaggcagcctgcagggtgggggtgatggggactgcagaggtgggggagggggaagatggatggtcccctaagccaatgcatcagaggctgcagcctgctctcctctttaggggctctccaagtgctggaatctcccccttggccatgcattcttctttcaggctccgtactgccctccagagtctcctctctttaaatcagaaactccagagaagaacatggcccattctagagtgcgaatgagttttgttgagttaaactcctctgtgtggtatgggaaaataaatggctcactgtgactctttctgccctttgtacccacaagacagagatgtgcacagagctggggtggtccagattttcctcaagctagatttgaatctcccaggaaagggaccaaccttctctttctcttcttgctgagctcagggcagcgtgttcagaccgagggacctaagtggctctggacaaggaggtgcagacctcagagggttaaagaaccagccagtgggtcctttgccaagtgtccatcctttccagttgcccttgtttatgccctaaaagcttgagaattacatgtctggtgtcggctgctccatctttatagcactgtgaaaaaagacaaagtggacgtgacatattgatggcctgtcccccttttcagcaaagagctcctccatctatggtcagggctgatgggcccatgaggttcaggaaagtagggactggcccagggtgggtgtcagcctttccaacctgggcttgcagaagtgaagcctgctcagctgaccacatttgttgggctttgttcctgcagccaggggcttgcttctgtacctcttctctggccagcagctcctactggtccccaggagagcatgagggtgctcccttatgtgtgtttttttggcagagggccttgatttgccagagtgctgtcatgtgcatgatctcaccattcttacacctcagcataggctcgggatggggtgcgtatcgtcggcatctgacagctcagaagcttgagactgggagaggccctgagatgtggccacagtgggagagcagagactctggtatcctgatggctatttttgggctcagttcctgctttcccctccaggagccctaggcagtgtctgaggacagtgtgaggacgggccatgctcagggagacacgagggtccttggaagggagaggtcctccctccccacccccaatcctgtggccttctcttgggataaggggctcaagggtgacctcatcttcttcccgcagacacccaagtagagtcagctgaggtggtgcctgtccttcctctatcacaggtgccctttcaaatgtcaaaggcaggcatgccatgggctcctctgcagaggtctctagctgagcatcaagggtggatttcaaatgcatttggggcatttgctattcacatgagtgccaggataaattctttgctagaacctagaaactgaactatgttcctttctgatgaacctggtaggggagtttagatcttcctgtttgaattctcttagaccagggtgagaagccaggctcaagtcagtggggacggcccacagtggaaggggctctcagaggcctccttggcaagaccaaaaccatcgctaaattacgtgatatgggcgacagacagggtccccgatgaagctaggcatcttcacttgtttgggagggaaaccacctccctcctctccaacagcttctgagcctctgcctcactccttccacccttgcctggattccttctccctcttggcctgttttttcagaacttcagagcctcactagctgacctcagccacatggctcagccctggcctgacaccctgacctcctcagcacataagaatcacaccatgccccatctgaggctccagtggctagtgtcatttgcttggttgtgtgtgtgtcttatacctgcacagcgagctcagcaaatacttgccgagtgagtggcagagaattccccttgctggagctcttcatggccatgggactggtgaagtggaggtgggggtcatttttcacagagggagtgccttccccatgcagaaggaagctcagaggactctgtccttaggctgcctctgaagtccccatccctatccccaggcctgaagcactccctgatatatccacagggacagctctctgccctcatgatttgtgtgcatgtgtgcttgtgtgtgtgtgtgttttggggggtgcgatgggcttctctgactcttatctcccatgaaaggagaatagatcataacagcaaggcagtggacctatgagtccctttgtggcttcttaggacagaccctccctttgggtcacacagccaagccatgcctccctcccccagcagtgtgtgaccatatcactgtgggccttttcttattccctcctcatgtctggagtgccttccccactcttgggccctccatcagatcctccaaccctttgaaccgtgttcaagctgcagctcctcagtgtaaccctcccagcttctcagcccttgctgggtctccttcgaaaatgtctgatgccctcaaacgagtgcttggttgagcagctttctgctgttctcatctgtgagaatcctgtccctcaactagaccacagcgcccagggctggacctcttctctggaacccccttaccaagccccaggatggggtttcataagagtagctgggttgagctgaacaaaattcaggaggggaaggtgtgtccacccctctttgattgcagggtctggtcacatggtggcactcaggacctgcctggtgaggtgaaataatctcgcctctgtcctctggcttcttcctaacaggctctaattcacttaaagaacaacaacacaacaacaacaataaattttttttaaaaaagaagcacaccaaccaagaaattccaacctcagcatccaagacaggctattttgaaaagaccaatagccaggagtcccatattacaggatcaatgtttggaaaatgtgactttctttttaaaagaagaaaaacaatctcacactgtcctggtaggccacagtccagctgtcgatagagggtgtctttctctcatgatcttggccatttaagccactgttctggccgggctttgggctgcacccaacatcaatacggtaagttcaatcacaggcatttagcaatatttaacctgagggctgcggcgaagaaggagttagcaactgtgactgggacgccagcctcaatgagtcaatccctcaaatccagaggggccctaaggaagcagcattctcatttttcagaggggtaggggctctgggttttgctctagaggcagctggccccggtcctgggaagggctagagctattccaagtcatcctgcaatcattgctgactctcaaggagtgcccaaggtgggtgagaggagttggtaaatggggagcctggcctatggggtaagacagagcctagcatttggctctaaagtttcttttcccagagaaccacccacatgcccacagagcccaccaagagagaaatgaagccaacttatcagctgactggtacacaagacccaacaaaccatgtgactggggttggaggtgctgtcttctgtggatggagtgaaaatatgcttcattcattcattcatttcgcaaccatttattgatggtccacaatttgccatgaaagacataccccctgctttaaaagagacaattggtgctgggtgtagtggctcaggcctgtaatcccagcactttgggaggccaaggcgggcagatcacgaggtcaggagttcaagaccagcctgaccaatatggtgaaaccccatctctactaaaaatacaaaaattagttgggcatggtggcatgtgcctgtaatcccagctattcaggaggctgagacaggagaggcgcttgaacccgggaggcagaggttgcagtgagctgagatcacaccactgtgctccagcctcgatgacagaacgagactctgtctcaaaaaaaaaaaaaaagaaaaaagaaagacaattggtaagcatgcttggaaggccaggtgatgagtgtgcaaccaacatacctatcaagccaaagtttgtgcagggcctattggtggcacaaatgatagcagcaaacactcactgatttttggttgtattttgggcattgttctaagggctttatatgtttcgactcatttaatgtaagtctataaaatagacttatcatccccatttcacaggtgaggaaatggagtcactcaaagattaaagacttgcccgagatcttgtgaccaggtccctgatagagccagtgtgtgagatgggtaggctgcctgcagagcccatgtcctgaactctggactctgcagccttgagaaggaggttactcaactctgcctgggggagaactcagtgcagggacacctgagtgaatcaccaacccagagtggccttaagggaagggtgtgctagggcaaagctctgcatatgcaaagactgaacagagtgggtttgggggccctggagtggtttagaagggctggagcctgtaagagcaccatctcctcaaagctcccccaggtgccttcctaaacatctttctttggctttctcactttctgttcttcctctcctctcttccccttcccttccctcctttcccctcccctctccttccctcttcttcccttcccttccctcccctccctttcctttcctttccctcctttccatcatctccccttctcttccctcctcttccctcttctcccctcccctcccttcccctttcttcccctcccctcctcttcccttccttttctctttcttctttatgtcctttccattgcctgactcctccctcttcccttaccttctccctccctcccttcctgtcattctgttttgtctcatgactagcacctatattatctcttgtccacctatttaattttcccccgaccatcccaggctgcagcatttttcccatccctacacagtggtaacatgggaccttgaggttcctgtcaccagccagctggtgactctgagaaagccatccaacccctgtggcctgattgctgccatccgcagggtgtctggagttccgggagagggttgcacctggcctgggagggaggtgggtctggctatgacagtagcctctgctttcttctgggagccctggggtagtttacagagtctcttccagaatctgtgaaatggggataatgacactcacctgctggggtcctgagtgcccagcagagcacctgggatataattaatggggagtgttactcttgttgttgttgtccgtagtaatagttgtgatgtgatgcttaaattccctacagtgtgaaaaatggctttggcctttgtactgtctattgtctgcttccttttgtaggacctgtgtgtgttctttggttataaccacactcatacacactcataggggacagggacctcattgcacttcctgtacagcacaggccagcatgtgtcggggctcagaacgacagatggtttgcttagagagtctaggatgctggtgtgttttgtttcccttgtgtgtgtgtgtctaagatgctaatgacaggaggcggtaatgagctggcaggggcctaggtgacaaagagctggcttcatgcatccccaaagaggcacctcagtgccaattgtttcttttgtgagaggaattgtcaagacctgggaatgtgggctggggagggctggagagaggaaagttggggcgttgcagacaaggtttacaggaggcagatctccacacaggagcagaacagggtcctggcagcactgagaggggacagcctgggagggacggggagccccaagagggtggcaggtccctcatgggaagggaaggagtgtggattgagcactctcaaccgtgttacctgttgacttctcaagcggaccctgtgagctctgcaatggcagggctggcccctctgcatgcctcttgtctgccctactcctggcacagggcctggcatggggactggaagcatggggtgagggatggtcaatggtttgcatgacagtgctgactggagggctccagcaggtcaataggtctctctgggcttcagtttccttttttgtaaagtgggtttgatgatccctacccatgagtctgtgtcctcagcatccagcacagtcctggcaccaagtgggtccttggcacagactcatcaatgaatgaatgagtggaggagtggggcatgggaagtacacgtccctcttttacacaccagggaaaggagcacgagtcaatcatcccgagaacacacatctggtcagtacggtagctagagctcaggtgcaccacccttctcctgggttgagtaaggctggggagcccagtgccgccctggcaaagggagagcaagccagacaaactgtgtaggaagctgactgtaagtcaacagatggaggtgtgtctccaaggctgtgcaccaaatggaagggaatcgggagaacagattcatgcgaggaggtgtaggcctagtgcagccagtgcccctgcccctgcctgggtggacggcaggcggcagccatggctggggagagagggaggcacaggtgcaatgctcacaagttcgacagctgcatagggctgtattctctgtcttcacttcaccttgagaggatccagggatgggaaggagtagggccgaggaggggtgttgtggagacccagacccaggcttagtgagctgtgccaggcagagccagcctgcagcctgaccttagcacctcttccgactcctgcagctgagtacatcttgtctttgtgccctcagtttaccccttctctttgccttctagctcattttcttttcttttcttttctttttcttttttttttttttgagacagagtctcactttgtcgcccaggctggagtgcagtggtgctatctgggctcactgcaagctccgcctcctgggttcatgccattctcctgcctcagcctcccgagtagttgggactacaggcacctgccaccatgcctggctaatttttttgtatttttagtagagacggggtttcactgtgttagccaggatggtcttgatctgctgacctcgtgatccacccgcctcggtctcccaaagtgctgggattacaggtgtgagccaccacacctggtcattttctttagaacctttctgtgtctcagctaagctgaatgtaccccagccccactggggaggctgaagcacgtagggtgaggtggatagaaggtccagctgaggcctctcctgcctggaatctgaggctgagcagaggctcacccccagctctacccttcctgtgaggtgtggggctgatcagaggccttagttgtgccagagacgtgggccatggccaaggattcaggccagctgagagcagaggtctgggactggagtgagagaaggtgggggtggccgggatgcagaaccatagggagaccctgggcacaaaggcccccacagcatggcattgtgacaagacactggtttggaagctgcacgttagctcagacgccaggatagggtccttctgtcaggtccctggcctagccaccttatctataaaatctctgcttaagtgcaggttgatgtgggaaagttccagagaatgaaagtgggaaggatgagtcagagctatggcttttaatcttgcttctacttgttcttccttcagctgagggctcaggtgggacaacgtggagccccagaccctggcagccctctggggcctgcgggtctccattccatcattaagtgtctggggtatctgttaattgctcagccctggcctgggaagagaaggcagggaaatagaagaagaaagaccacctgacctcaggggcatcctgcctggggatgggcctgggacagagggatatggaggaagccaggtaagctggtgtgtggcccagtaaccaagcttcagactgtagaggcctgaggaagccatagacagaaacagggcatctggggaaccttcctggaggctgggcaggctgcctgggcctcagtggaggtaggtaggaagaaggaggaggggagggccttgcagtggttggagtgaacaagttatgtgtgggactcggaggagcagtgggcatttgcagtcagccagtgtgctctgtagaaatgcactccaacgttgaccagcacgggctgcctcccgctttcctctctccttccattcctctctttctctctccattttcccccttctctcaccaaggttctcttctggggaagctggggcatgaagagggaggacacacatggggctaagggagaaccagtagccctcggctgaatcatgtttgtgcatcactcgtggtctcagcagcatgggctgcctctgcctcccatgaccaggccccccgtgaacctcgagccactgagctgcccgcttcgtctgtgggtctaaatatagcggttgagatgcgcactctggaattggatttgatgtagccctctggactcgagctaacttttggggagtagttttcttgggagcctgccagtccaattcctccctcatgaacactaattaccgcacagaccttctccatgaaatcggtgctgaagccatttccatccaggcggctctccaagacgaaatttttctactgggaaccgacagccgcaaataaacctaccatctacttagcaacagagagcaagagcgggagggaggaaggaagggggggcagggagagtgggagggagaaaggagagggagggctctgcttcttttcttcctcctgttctttatttttcaaaaaggatgtaatcatctctcaccgggaaggtggtacagggcatctcatgagacaggacagtggcccaggagaaaggctcaggcctccagcaaggctagtatctgcttttggtggcctgagtgtggcccgggccccactgcactgctgggcaccattggggagcaaaggcagccccttgccagctgcagggtttcttcccttctttccctccctgatctccctcaagcctctgcaagcctggcctgtgcccagctccctgtctcacctcactaaggatgggccccatccctctctctgcctggtgaattcccaccaatcagccaaggcctcggtaacatctcacctcgtccaggcagccctcccaagccctctaggtagcgctgattccctccattctcaactctagaggcctgtcccaggcacccagtgctggggtcggatctgctttccttgcttcctaattgagcctttgcattagctgcccaaagaaggatgggcactagagggacagagcctcacagtaccaggtcgggtgggtgcatcatcacacatctgtgagcagatgacatttccaccacggtgcagaggatacccatgaggcacagaggggtcggatggaatgctcatggtcactcactatctagggggaggcagggcttggacttaaatgcatgtgtgtgtgtctaaaggccagatactgcgctttctctcccctggcctcccctgggatggttctggggcagtgcctgattctttcccacctgtctgcctcaaaggtcagcccagggctctgcgctcagcccctgttccaggagcacttgcagccagagaataggagaatatattttcccatgaggtttaccaaggttgagggcaggctcggcgagctcttatgactcctggcccgtggctggcactccagccaacaaagcccaagtggtgcccagagcctgctgtcgagtcacgagtgctgtcccaaccttgcccagtcagcagaagagctacttcctccctcagaagagccccttccacatcctgtgcttagctgtgtgcccagggacactccaagccaaggtcccagctcacaagtcacctccccagaatgcttagcatctgttttctgagactcatgcgtggaggacaagacattctcagaaaagtcactaaaaggggtgctagcaccacttctgccaccaaggtttgataaatctcttcacttctctgggtctcagttttcccttccatcaaatgggcatgctgagtcctgccctagttgtcttacatgggtgggtggtgctggcttcaaatgagatggcagcagggagtactgagagccgcttgaatgtcaggcagtctccttcaaggtccctgttccatttactctgcttcatgctctcccaagactctccttttccttccctgaccccatctggagtgggtaagtaaggccggggctcagttgtcctctccagtaagaagcaaccagattcagggccaagagagtggcttccagagagcccctcctggggccaggagaggatgggagttcctggaagagctttctcttagaagagacctgggctagaaatcatgaacgtgggttttatgctcacagctaagccacttttcttctttggatgcctgtggccttatgtatagggaggaatggagttggatgagctgatctgtgcagcctggccccttccattcagatggtatggttaagaatggggcttacggccgggcacagtggctcacgcctgtaatcccagcaccttgggaggccaaggcaggtggatcttctgaggtcaggagttcaagatcagcctggccaacatggtgaaaccccgtctctactaaaaatacaaaattagctgggcatggtggtacgtgcctgtaatccgagctactctggagaggttgcagtgagccgagatcacgccacttcactccagcatgggtgacagagtgagactccatctcaaaaaaaaaaaaaaaaaaaaggatggggcttgcacattgcttggctcaatttccttttagcatgtgatttggggcaggtttcttagctgctttcctcgtctgtaaaataggagtctagcagcacttacttacctccctggcttgctgagggttaagtgagaacacacatgcctggtgtacaggcagggctggctctcagtaatcagagagtaccagtcaccaccagcacaatgaagcactgcctcgggcgaggggcggtgcttagcactaagcacacattttctcacttagtccactggctctattttcattttttggcgtgtctgtgagaaatatggagatcctcgagaggtgaggtcagagcgctacctggaattatggatctaatttggcatctacagagtaagtctcagcatctggctggggcaagaggcttctttacaaaagaaaagggcctgagccacaaacaatttgagggccagtgaggatggtgaccaccaggcctgggccagagcacgggaaggccaagaggagtcctagggctggccagagcccatcctcctccagccactgcaggacaccaaggctgagactgagaaaggcaggagaagtgccttggggttctctggttaggagaagcaggggcagggggcaactgtcctattaggagaagcaggggcagggggcaactgtcccagagggaagtgaggtcctcatatgactggtgtctcgcatggctgaggccagattgatgaccaacttacatctgcttgacccatgggcctggtgactggggccagccaggccaacctgtagcttccaagaagcagtctcgtctccacactccctttctttcagcaacttttctattttctagttttgcatctccgcttagattcctggttaatcttctttggaaaagctccaaacccttcagcagagctaagctgaaagggtcacatccaccatggggtctgcctagaggggaacatgggaatgggcataactatcctggctggagttcaggcacagtgggcttttgggagccgaaacgtcggtgggtcagggccaggtggggtgattgtggggaccaagtccttcctgcctaaggtgagtgcccttctcccaggggaatcctccccagcctttttgtgaacagaggacctcagtggctggcaggggagcagggtggttagagacatgggctttggcatcagacagacctggaatcccatctgggctctaccacttcctggctatgtgatgttggaggagttccttaacctctctagccccactgcccagactctacagggggatcgatagtgtgaactgtgccccaggcctgttgtgacacatgtgaagctcccagtacactgccaggccccacatgtgttcctgttgtgatgccattaagcagaagtgtcctctggattgcccagtcctcccagaaccacactggagcaagtcttttccatgaggcacgtcttttccatgggacaggagggtggtggccttgatctgcgggcaagttgcccctcccaggcccagggagagtagtgggtaggagctgccattcaaagcctcagccctggtttgtttctcccccctcccctcccacccccaacgccgcccccctgttcttttggcattctctgttccttctcttaggcgggtggctgagcagaaaaacaaatcaaagttgccttcgtgtcttgaagcccgcgatgctcctgcaaagccatcccttgcgtcccattacccaccccaataactcttgtacatggagtgtgaaataattagcagtggcaaaaataatttaggaaacaagaagaaactaattgtataggcttgtttggggaaaacacagccgaccaaaaaatcccgcagtgtagggagatgtggagatgtggacagaccagccagctccctgtaggtcaagcccatgggctatcacaggacctgctaactctacatctgcccctccaagagggggctggcttgtgctgttgccaggacaagtgacctcatgggcacagaggtgacttctcaagacacatttacagcccatctatgccatcccaggaaggcagatggagagggaggttgggcaaactggaagggtctcctgcggtcacatgggcctggtgtcctctctgaacttgagctgcagtcgcccacaaggcccccacatccagcaggcctggaatgctcctgcctgcctgcctttgccattcaactctccagccccaaaagactcccactgcacatcagcccaacggcagcagcgccattaaacgcaatgtggcgcttccctgggaaatggggggaagcatcgcgccttgcattttatggcttttctaactttgaaaagtttgtttcctccttgggcacttttctgcttcctaagctcccttccatcctccgtctcatctgctcctcactttccgggagctggaagggggtcaggcaccctcgtttccttgggccagatgaaaaggagtgaggaaacctgtacattcttgaatggatggtttcaggtgagggaaactagagccagagagatggaattgttggcctaaagtcacagttgccaggagggtgtctcagggtgtgacccagggctctctctctgtcccctgctgcttcttgccttccctaccctgctggagaactgtcttgcccactcaaggcgttcaccatgatcccagctgagcacgatggtctcatatgctcccctcagtcactgctcaaggcccagagaccctgacagtcatctgagtgagtgctaggaacagggtggggaggaggcccctccccttctcttctgcccctcaccttagatgggtgcatttgtatttgtctagaactgatttactaggttgttattcgggacagaaatctcacctctctctgtgcatgttcttgtctgctatctcctcactcatcttctctggtctgataacctcctaattcatcccctggcctccagcgtctctgtttcaggccagcacagtgattgtcctaaggccaggttctggtctgtcacttccttgctttgaaatcctccatgacttcccatttcctctaaaatcagtgcacacttctcaggcttgcctgctatgtgatattgctctctgccatcctccttagtcaaatctcagtgttcaaggcatcactttaaatcgggctcctcctagagaaggcagctgtgagagagcagacctgggtttatactgggctgcttgtcccctacttcactgttttcacaggaatcacagcggctcccactgtggcatggctagttctcatctctcagacacacagccacctgctgaacacaatgcctgagggcccagggcccctcacatttaacttgtgcaaagaggcccctgttatgtgcccacatctgcccatcctcctgggttctgccacgctggtgatcagcacccccgagccagaaacccagcagttctacattcctcccccttcatcctcacttaccccacagccatctccaaagtggattcctcctctccaccagcccctgccccagcccaggtccagacctcgccatcactcgccaagtttgtgtttcctgcagttcctgggagctgttacctcctctccgcttttccctgccaggcacctctgggcctctcctttctcccatttcttttccctggcttggctgaagtctgatactgagttgctatggcatatgagacaggctgggcttgatcaccgcatctctaaggccagactaagacattggaagctgtgggtgccagtggagattggggttggtaagtgctagcaaggcagtggcatgtctgtgtcatcatcagtctggaatcaggacatgggatgagccaggggagagcgtgcagaggcaggagggtgactctccagaggcaggcccctctgggcccatttgctgtgctaattgcctgacagaattacagggcaggtgtccaggtcttgggctgtggtctcatcacacactcagcagctgaggtcttttgcggagtgggggttaggtggagagctactgaaataagcatggagaggcacccccctcacctcctgctgggttgatggatggcactaggcatgcataggtagggcatgcctgttctccacgctgacaaatgccacaggtgcagctgcaggggacatgagacagctgctcccatcacatctctgtgtgtgctgctcaaggtcatgctgtgagctcaagtggtctggtggactgggggcctgaagccccccttgcggccattggttggtctccttagctaaccattcctttctagctggggaagcaggaggggtggtggaagcaggagggaggcctcttccctctgagccaagccagtttaactgtgcacgtgctgacacaaaccctgagatctagcatctgtatgcttggagagagaagggtgatctctgctgtggcagctcagctgtcactagtgtcacctctcttctgcctcaacctgttcttctgcctcctgggacgtctgcatacaccactcctgccctaatgtggtcttcccagctcaaagccccatctcgattgttctgggatgtcatcagtctccctcccacagacagggctcaagggttcagccatcaaaatggacttcagcttttctttccccaaatcacttgtacaaaaattaatttaatggaagaatgttatcactttatatccccccctcctctaatgaaaagaaaacaaagattagcacctgcaaccacttatctatagtagactctagagaataccattttcacatggaattgatctaaatttataatatgtaggtattttgagttctgcagaaaagcaccacgaagctaggacatccaggcactgggtgccctacccatgtgggaaagccatgtgtgtgtggtgaaaaaatccaggaattggcatctgagtttctggcatctttcatttggttgacccaagacttgatctatctgaacctcagctttgtcatcggtaatgagaataaaactgatcagatagggttgcccctaggattagagagagcaggcattgcatgacacagcagacactcaatgagtattgagttcatctgaatcaaggtggggaccttgagacagacaagtcagtttggacattgacaaacaataagaaggcataagccgtatgatctagcaattctactcctaggtatatgccccaaagaattaaagatgggtattgaaacatatacttgtacatgcatgttctcagcaacagtattcacaaaacctaaagtaggaatagcctacattttcatcagcttatgaatggataaacaaaatatggtatatccattcaatggaatattattcagccatcaaaaggaagataattctgacatacactacagtgtggatgaaccttgaaaatatgctcagtgaaagaagccagacacaagaggtcacatattattgattccatttataggaaacatccagaataagtaaatccatggagatagaaagaagattagtggttaccagggattgggaggaggtaggaatggggtataactgcctaatgcacacgaaggtttccttctaggatgatgaatatgtctcagaacttgagcatgatagttgcacaacacagagatggtactaaatgccactgaattgtacactgtaatgtggttaatgtttaagagaaaagaagagtaaagaaaagaaagcatgggggaaatgaatacactaaagcacaacaactttaccctcctcctgccccacgagttgcaatattccagcccagaatcctcagtgcacagttcctcagtgcatgccaggcttctccttgctcaacctggccgaatgttacttggacccagctggccaatctgctgcagggacccctgccttcttccccagaagctggcattgatccactgtgcagatttgtctctttggcacttgggtgcctcagctctcctgctcctctaggcttccttagtgaccccagcaggcttccatcagccacagaggtttccctcacttctagaggcaaccctgtgcaatccgtctctgctctctacctcaccaggatggtctgaagccccatcatgagctctccacttacagaatgaaactcgacttgcccttggcccttgccccgcctttctacatgcctggtggtctgagggggtggacttcatggtgccagagtttctccctgtaggatggtccagcagtaacttctctgccctgggcttctgttttctccttggctcctgggcttcctttggaaacatcttcccttccttctccaggtgcttccacttagccgtgcacatgctccccctttcaccacataacagaaacatccaagaagatgtgtcaacagtcagtgctgacccaggggctgtgcctgagagtgacattggaggtggccttctggaggcagctctgccttcctgggtggtctgttttctgttccatagagtaacttgtgcagcctctaggccattacccaggggcactatttgtcacccatcaccccacctcctggtcatcaccatccccaccagaaggtgccttcctgtgtcccccatcccccagcggtgctctgtaatgatttgttaaaagattgaatgatgaataaataaaggggaggatggtctctttcaggacctttcaccaacctctcccttccttaaaatccttgcgtgttggaagccgaaaccttgcatgtccttagttactcactcacccatcctgccacaggtatgcatcagctgccctccacaggcaggctctttgttcggtcaggtgcccactgtgtgctgccctcatgagcatgtgagccttgatgcttccagcaagccaagcttcctggggcacggttgggtctccccgcgtccgggtcccctgcacaaggctctagcccatcaaggtcagccccaaagtccttggcattccccaggctctcctctcaggcccagctcagcctgggcctccctcaggacttgaatcctagtctcgctcacccacatttcactctcccttccccaaactcagcctgtgacactcttggtctaacatacccattcgacacactcctcacactgccattgactacccagatgtgaatctcctcctgctgtgagcgccaaacagtgggagcatgggcttcttcatctgtgcatccatggcagcacttagcgctcagtcaacatctcccagtggtaaggcaggaggtaggtgggataagttgctggttatcctttccctcacactctctgctctttttctttcattctttcttcttttttgtaaagctggagggaatacaacttcagcatctccacccactttataaatactttgacaaatggtttctctcctaccatgcttaccccaagcaggggcatctgtcatttctgaaagcaactgttacagcccctccgacctttaatgcagagtcagcggctggggctgggggtggggatagaggagggggcagccacgactgcagttcatcaggcccagaatttaaaaaaagaaagaaagaaagacagaaaaaaccgtacacaactcacagagtaattgctgtttccttggcaacaaagcagcagtctggggcccagtgctctgctgtccttcgctgggctgggagggccagggacagttggggggcagggggcgagagtgtttccctcctcctgtggcccttggaagagaatctgtcttcaagtcactcttcagccacctttcttgttttctgttggtctcttggctgcagttcataatatccaggccaatgtccatgtgctgagcgtgatggggccgtgtcggccacccaccctccaagatgagttccgtggagctgcggcctctctgaaagcccaggcaccatttaaggcattgtcttctttcctcctcctctttctcttcctccggttcccttcttttctctttcctttctccctcctccccctttttccttcttttcctttctcttccctttctcctcatgcttcattttcctcctcttcttcctctttctctttcttctcttccttttcttcctactccatctcctgtcctttcttcttccaccctttatcttgacacctttctcgtcttcctccttctcttctttctcctccttctcctcctcctctttgtcctcttcttcctcctccttctccatctctttcttctcctcctcttctttcttctgttctttatctttgactcctttctgtttttcttcctcctcctcccctttctccttcttccctcctgctttctctttttcttcttccctttagtccttctatactttctcctctactttcctttctcctcttgttcttcttcctcctcttcctgttcctcttctttcttctctctcctcctcctccttctcctctctgcccttgtctttgtaaaaacacccttctcccgggagttctgcaggtgtcattggccttcagggcccatggatgacagcagagagctggagaatgggaattttgaggagtgtggggtctcagaggctgggagatgcatggtggatctcaggggcacaggagacccaggcgaaagtgagaaaagtgccttctctagaggtttgggagaagagttgaaacccatgaccttccctagcatccaccaaccacctggtccagtcatgtgtggtgctgctgcgggaactgagaatggaacaacagccctttgttccctgcctcaatatgggtcgctttgtcttccaaggaaaactctgtggtatcccccattctagaaagtgtctcccagttctgccaactctaatggtccatccctactctgccacatgcaggaccttctctttcaatccatatctgtcatctgggaggtgggatggactcccaggcacagtgtgagcaaactgagagttggagaaagcctcattcttacaggctcctctgtgtccagcaggtgttcagcaaatgtgtgtccatggattggcagcaatatgggtttcctctggtctgagctttactttccaaagagaaaggcatggagagctactgggcaggggcgtggaccattcttatggaatggatttgatgtctccattctttcactcactccagggcctctttagtctgcaccaaccttctctttccagctctacctactaagcttctgtcaagaacatcttcttactgttcctgagacacacctgctcattcctaccagattgtccatgctcatcctggttccagctcctggaataccctccctagcactttctgcttatctttatccaacctgtactttcaggccaatccgcagtgctccctcctctatggagcctccctgaagggttcatgaacttctgcatgccttgtcttgctccagcagttacagtcctaactacctctcttgtgttgtcctctgatgggtccatgaggccctaattttgtccctcttcccttctgtgtggtgccgtgtgtgtgtgtgtgtgtgtgtgtgtgtgtgtgtgtgtgtgtataccttctgacagaggtgtgggatggtgacttctgaggtgatggctctaccaagtccagcaaacgcagatgctcagggcaagtccctagaaatgtggagacacagatctctctggtctactggtcagcagagcactgggtccctggtacctctttctgcatttcctgtaccctgacccatctcaaacaactagaggctctgatcctctctggccctggtgttcaaggtaatctgctccacttctcccatcatctgaggggtccttgactaacagctgaaagtacggccctcttcccctctctctcctaggacgagggcattacaatgggaaccaaagcttcctgcaaaaggaacactgttttctggcccagggctttcatggaaatcatgggttaggacttcttcatagtatggcacatcaccagcaaacacttattgaacacttattgcatgcatggctctgtgctggatgctgatgagaaggaaaagagtttcttccgagagcctggtatctgacctcagggagctcagagcccccttgaagagcaaagcagacacatgaacagacaatcacacgaggaattggaggagactgaaaccaaccaattgagctcccggtcccaagcccaaggaggcctgggcggtaaacaaacaacttcagaaaagcaaagggaattagaattttaaaaaccttccggtgataataaaatctggggtataaaatgggttaggaaatttattttttcaatatatgatttttccccctctcctttgaaaatccacatatctattctgcttcaggttggggctcctttaaatgggtttattaaaaaaatcatttactgtgggcttttcagttcaactttaactggaccgggtggaaattaaaaaaaggatattttaaaaataaattatataaattacagccctaattataaaggaacttttaaaaatgtatccaagcattaaaagaaaatctttttttaaaaaaatgccccatttccctgttccattgcgggaacataatttagatacttttaacaaatcctcatcctttggaagaagcgggctctccaggcccatttgcctgtgtctctttctgagtgctattattatttgataactctgggcttaaatctgcatgagagccaattatctctctttgtcatcaagcaggcttgctgttcggcagtggtttttatagtacagtaaaagccttaaggagcctggaggagggggatttgcagttcagattacactgcatcttgcctccctaaatgcctttccttattcccttttctgtttttgcttttcatccctccctggtgcaacaagttctcccctcctggctgctctgcagtgttgtctgaccccgagcttctccccagcctggctaccctctgccagtgctttccttgaggatcccatcctatcaagggtctttctcccttctatctttggcaggcctaggcttcctgaacacaagtggtaggaactggcatttcttggcccatcctccagtagaggcctaaagcaatggtcacactctgctttcttaactagcggaggttgcatcaagaccgtaacgctggagggagacaggcctccctactcgtggagctcacagcttgactgggacactgaacagacccacccgagggatggtatcaagggtggcggtggatccagtgccttagcagtgaactgaagggtgctgccctccagctggggcatggggagctctgggggtgtgggcatggtgtcctgcttcttttatttctccaccaagaagagccagtaagtgctgactgggaaggacagatggagcttcgcagaggggctggaggacattggccagatcctgaaaggctggagtgggtggagggcaaaggcaggagaccaggctggatgagagtacttcatcccggtgaaagcaggacttgccttcttcattgtagcatcccagcatttagactgggctgggtgcatggaggcacttgatgcactttggtggagtgagtgagtgagtgaatgaatgaatgaatgtggatgatgagggtctggtgaaggtgtggagaggctgtagatggattcagagggtttagggtattagaccttttcagtctcagatagcaaactgcttttttctggcaaaaaatattatttactggcttctcatcatcctaatcatagagcccaacatcccttcctgccccctggtagaccaggcctcctccctgctcccttcttggccctggggtaggcatgtgcacacaccgtttcctctgctgggaggctcctcctcccgtccacctggaccacccatcccaccactgttaagcatcgcttcctcctggaattccttcttgactccaaaattcaagtcaggggccctgctagctctagtcctcactaactctgctgtccccatgccaacactagcctggctcctggccagcaaagggagcttggggaagacagagccctcgccccggccacagactgaccgttatctccattggggtctttcacacaaaatataaattatgcctaatagtagctagaattaactaccaggaccaggaattaactactgtggaccaggcactgtggtcagcattttatataatttatggcattattcctcaagctgagatgtggagaccatgaatgacttattcaaggctgaacacatatgtgtggcagaaagccaattcagaacccaggcaggtctggctccaaggctttagctatttcccttgtgtagctggctctgagggccttgggcttggagagggtggctcacccccacagctggcatggggcgctggctcccaacaactgcgctccttagctgtgtagctcagctctgggggcacgtggctgggatctcctccccattttaatacttgacacaatttccctccccaaaaagctgcattaggacaataacatggcctgtgttctctctctctgcagactgggaagccctgagaggctgcgggaccgtgccttcaactctgggtatcacacagccctcacatatgtgcacatgcacatgcatgccccatccaagcacagggatgggtgaggcaactggctctgcaggcttctgccttctacttagcactgagagagccaggaatgctgtggggtcagttgctccctccccatgccctgcttggaagacagggctggctgagtgtcccgtcccctctccccactcagagaatgtccagagctaagtctgagcaaagggccagcttttgcttttggggctggggtacaggcagattcctgttggagagcatttattttacttttcaagtgtgggctttctggaaggtaatgggaaactgcaaggtgtcttgcaagcaggtgtttggcatatggtgatgtggttcccagggtggcttttgggcaggggcagggcggggtcctccaggagctgtctgtcggtgctgagctcagtctgcttccctaccactcagcccactgcttggatggttccctctgtcactctcctcttacactgtccaggttttagcactgaaagtcatatgtgtgggaagcctctcagtcccaggccaaccagaacagttggtcgccccgtgtctaacatacctgtctaactgtctccagggcatggctcatcagcgtggctgtggcaccctctccctgccttctcttgtctccttcactgtcaagtctgggaaagggctcctggtgggtgtccgatgaggcacagctgggtgacaaagatggctccagctctggttggggcgtgcacctcatggtgacacctccctctgtgggacctccgagggtcaaggaaggaggcaccttccatcctaggtttaggattcattgcacttacacaggattccccgtggcagatcacctgtgttccagaggctgtgtagttcagggtgtgtgtgaggcagttgcatggtaggggggcacctataactgggggtaagtctgtaatggtgcaatagatgatgttagaacagtgggggtccccctccctctcaggcctcaaaagcacaaccaccagagctggtgggtggcactgggccatggggagacctgaccagcaaggctccctctttcctctgtccaggccacccagcctgagatacagtgctggtcactctagggaatgctgtggcccccaggggacaccccttgggtggctcctccctggcttctcactgctggctggcaggcaggctggtgggcgggcaagcgtaatattacccctaagataaatgaagaagagtttcagcccttattggattatagtttttattgaactttataaattccaattagcagacccctgggcaataagcgacacacagcccgtggctcgctttatagcgtgattatgaccctgtttatcctcccctgaacgagaagtattaatggaggaaacaaaggaaagggactcaaaaatacataaaaacagatattggtgacacagagataaacagacaggagtcagggagagaaaacaatctccgggcaggcaagggggaacagagaatcagagattctaagaacccatgtgctcagagccaccgtgagcttggatgtccttctggcctccctcccagggtacaaagccccctaggctcctgaaggctgctggggcctgaagagcaccctcccatccccaagccctacctcaggcaatcttgctggggttggagtgtgatttactaagtgcagagtccagcgtgccccacactgggcagtctgctacctcctgaggccctcagctctacagctgagcagctccagggatggcccagtgtggttccttacagttttaggtgtcttctttgccctttaagaatctgatggacattaacatgcattgattctagaaaaatgtctccatacatgcacatgcattatgtacacatgcacgcacaagtaattttgcctataggtacagggggttgtccaagctctgaaaactgatcatgcattctgccccctcctccaggggactgaaagcataagattaagaatccttgagtttgaattgaaccaagtaagatctgtctcccaggagcttccacctggaggtcctgagagcccacagacagatgggcagcctccaagggcctggccacagctgggaatgcccctccaaccccacctgcttttcatttcttcctggatactctggtttgcgttcatcagctttaaatttctaacagccatgacccagaacagcagctgggaagaagctgtccctagagaggtgtgggggtgagctggggggtcctgagccagccaggtgggtggtggtactgctcttctggactgaaacccttgcccgacttgctgcatctcccaggagaaagaagtgtgctcaaggatggcgtgccctcctcactttgtctggctttgtttgcgccttcctcccccttctgcaggtcatctttcttggaggcttcagtggaagattaaaaaagaaaaaaaaattcctcctatcagcattttgccgttgtttggaagcactaacacagaagtacccgaggaggcttttgtagtttgaacaggatgaaaaatgcttcaggtgttcgtcagtctgcagcagtatgtaaataagatgccgagatctgtgggcagcgaggagtatgtctggctggctgggcccattaggagagtcactgaggagcccctgccacaagcgtcccccctcagtggcctgggccttggctcgcatatgctctgcacctctgtgatttatggagcttgctgggcactgtcttacttcagataagcagtgtggatgtacataaactccagtggtcatgaactgctccagccaggactttcctgattcctgtcctctgggaggcagtgaggcagggggcctgagccaggaaaagggactggaatgacagaggcagattcctgaactggcagactggtgggagacaaggggttccttgttaagacctgggaaaacgggagggagaaggtagctgttgtcacttaggcaccaggacgtcaccaccctctccttgggggagactggggcttcctgagagcttgcattacccaagcaaggcggggaggcctagagatgagggaggccatcccatgctaccagggctgcattctctcaccccaagctcggggcccctaaattggctgagcctgactcctgaagaataggctgctccttcccctggccccagctctggggaacagtgtctcctctctgttcatgtgctgggccctgggcctggccaggggagcaggggtccaggccagaggcatagaaaccaggccagagtgctgtgtgcacttggcactttccagagagcggtcccaggaaggcgtgagttaaatagggcatgtcttctcctccccatttcatgaatgtagaaatgaaggcccagagaggcactgtttgaccaagctttgcactatagctgctccattcaaagagcaggttttggagttgtatctctgggttactgcttgactcagctggcagagggtaacaggcttcgggttgctctctggaaaaaaggtgtttttcctgattgtgggagggtgggtagggggataacagggcctgagagcagagccgggagcctagaagccactggtgctgtctgtctagctggctggttcccgtaatcaaaaagcccactttgaaagcccctgaggcctatgaaggcttgggcagagcactcagatcccaagacatttaggggattatcccttcttacccagaggggacagtcttatgatgtcatatatttctgggctgtccttctgttcctagcacactgctatgctcacagtaggtgttcagtccatgatttcagtagagtgtcaatgccagggcttcaggctttggaatgcagattgatggacagtggggactttggggttttcctggcacttctgcaatcatcaggaaagcccctcttcacattgccatgaccctccagaccccttggcatggggaggggtccctcaggatcctttcaaacagatgaagaagcaatctgcccagacagcctaggggatgggatgtgggagaggggagggtatcgggggttgggggacagacatatatcagggggctctggagcctccttcaaccacacctgccaccaactagccaagtgactgtggccctatcactctctctctgggccttcgtttcctcacagcaaagtggaagagttggcactgctgatctctgaggtccgtgccaagtctaagatcggcagattcccttctctgatgtttcaggcacgaacacaaattagcacgtatggagaactgtggcaagtaataatggtcccccagccctccaccccaagtccccacactctctattctctcctcatgccccctgcaatagatcatacaggatggattacattaattttctataaactatatcaacttgagtgacatgtccttaagggttggctgattgatatctacaatgcggtcttataatctaaaatcatattaatattaatattaaagattttctgtcctctacgtgcaccattaaatctggagtataaggtgaaattgacaacatacattttgacagcttatctataataaatatgcaaatcttgatgcccacatgtcatcacagatgcaccacggccctctgaagatcagagcgtgcctgtctcccgcgtgacattttcagcagaggatcagagcaaccgtctgggctgcaggagcagcactaggcgagccttttgcagcggtgaccctggcctctcccgtctgcctgtgaaagcctgtccttcatcctgccatgcaggcaggaaggcttgaggagtgacagtcacagagagcaggggacaccatctcatgcaacttctgagtaggcacagaaaaatccagcttccgtctttatttctcttaagtctcaaaggaacttttgctgtctgctccacctccaccgtgccgggttatagcgggttaccgtcactcagcacccggtgagtttaagagtggagaatgcctgctaacctctgctcataaccttccatagcctcagtttctgcatctgtctaagaggagaggagaaatggtgcctttcttctggtggacatgcgaaggttgaatgagataacagaagccagatgcccagcacacacagtaatgcctcagtaaaggacagctcttaaattattttctaaatgagtcccacctcctcctgactggtgcaacacgcaatgctccttcctgtccctctctccctatcttatcatacagaatctaagagttagcatagtgaccatggtgaattcttctctgcctctgaccagtgccagatgtgagctccagatgacagggaccatgcatctccctgcggcccggcccccagcccaggacccagctggagctgagatggaagagggactgaaattaggactaaggaactgtctctaaggggaaaatgttgtcaactctccattgagaccctgccaggtctgactggatagctctgtgtgtgtgagcgcgcacacacacacacacacgtgtgcatgtcagatgggggcaatgaactgagcctgtgaaatgcaatatccttgtcacattaatagacacgttgagaggagagctgaggaaacaatgaggggaattttccatgggtgcagggttgtttgtttgagacgagcttcagtggtcccatcaccccttcacacctcctaacagggcagcagagcccgctggaggccctgggccacagctcttctccctggcttccttctctcttctctgagcccaccctgtggggcagcaccaaatctcccaggcttccgcatctgtttggcctgcctcaagagagttgggcattgcattgtctccttccctacccatccaccctctcccatgaaaccatccctcattagtcccctgactcggagtgcttctgtctctgaactctgcagcatttccagtgtggagagccacggggccatattctttgtcatgcctccttgcattgttctgtgatcatttcgcagtggagacgttcgttgcccacaaccagattcacaaggggggcgggtaggcatggctatgctccccctttctgtttccctgaggggcttaccacctggctgggcacccggctgggcacacattcacgtgggcttggttgggaccctccaatagtctatatctgatgaggaacagacagcgggaccacatggatccagaagtcttcagaggctcgtttgttgggcatttcttgcaaagtgacagttgacatggatccattctcatgctcccccaggtctctcttggggccaggaggccccagatgttcttttgggatatcaggaaattccttcacatctcttaccacccctccaggggtagacatgcccaaggaagaagttccatctttcagcacctggtacctgccatgtgtccctaaccctgggaccctgagccacatgcctgtaatcctgaccaagggtaaggagtttggtgaccccggctggggagacaggcttgctgggggagtatcactgctgggagaacaggcggcaaaactcgggcccatgcttgcctctgggaaattcaggcccatcataggatgcccatcagcaaatcctgcagctcaggctgcgagtggaatgggtcttggggagggcttgagacctcatggcctgctaagaggagccccacttacggagatttctaggcttcccagccctttatctcacaaattctcatgccaccagtcccttctggtccttcctttccgtgaaacttgagtctctacactgtctttaataaacagctgctgatctatcagtttacagttaatcagtcaacagaggtgaaggtgggaggagggtggtggagaaatgagcgtgtggcttcttgcaactcaggctcactgagcccccaaaacgcctgccctttgcatgtcactaccactcatttgtccatgctttctgcctcccagcagatggttctgtgtatgagcctcatggggtgcctgggtgccgtggatatcccagagagacactgtgctccgcacccatggagcctccaaggaggttagatgagataatatttgactgtcaccaggcacagtgcctggcatacagcgagacctccataaatgttagttcttctccccgccttgaatgagtcatatctggttggagagaaaaggccacttaaataaaataggaccagatatccacctcggggagggaaggcagggaagccagtcaggctgtaaagaggcctgtgatgttggtgctggcgggtgggtggtaggatgagggtgacaaggtggaagaaggaaaatggccgatttcagatggcttcgaatgccaacccgaggaataaggagtccagggtcttttaaaatccctgtctctgtttgcctcctcctctctcccacaattaactccaggctgtcttgatggccccgcggtgacgaatgttctcccctgttcccacctccccgctttttttatttgtgttgacttgacgcgccctaatccctgactcagctcccacttcttgttaaaccaaaggtaaattttcggccggcggggcagccccggagcgggaagatccacaccgcggagcagccgtaggaaatattgatattagccgacctctggcgccgtccgcccgcggtgaaaataagacgcggggccaatcaattaccgagccattaagggcgggaacgcggagggagcggcccacagcccctgctccccagccgaacatcccccgagccgcaggccgctggggtgcgcagctgcgctctacgccctccgcgccccggccgcggctcccggcagcgaccgcagcgcccagcaggagaatggggcgcagccgggctgggctggggcgcgggggtcgcggcggctgcgccccagtcccgagctcggtttcccgcttcgctctttgagccccgcttcctctccctgaagcgtctcgccctcggccctccctttcttctctctccgcctgccctcctcccttctcctttgttaaccacctctctttcctaggggcctcttgcttggccagccgaccacccttctggtatccctttttgtgcctccccctttcttcccttcctcttaagctggccacagggtggctccggttccctatcccctggacgccctctgaggatggcactgcgctggcccggctggagggacggtggcctgtcgctctcttcagaggccctgccctttcacacctgtcttcaccagcaggaaccaacaagaggcccttcttatttggggttaatgacttctgggaatcctttccatctttaatgtgttgccttctaactccagacaatagccccgtgttagaagaggcatggccacgcctagactgggagccagcggtgctcctggcgcccttcggggtggccttctgggttgtggggaggggagtggaagctgcccggcatgtctgcataggtttgggttctgtgtctgtggctaggtttgcgctgtagggtgtagggcaagcaggttgtgaacttgagcaaatattttcacatttctcggggacaatcttctgctttctagagctgacctttcttaggggagggaggggtggggaggggcgggaaggaaaagactgttagggttccttggtgactggctgatgggtctacagtatttcctcaaacttccatgacaagagaatgggattcatgaacatttacattgatcagacattatgctgaagggaggaaatggtactttctccctttaaagaaggatcctgcattttacaaaatcgaaaataattattaaaaacccctttcacaagatcccttgttcacagtctcatagaggaatgattctcaaaagtgtggccgcgacctgtaggaggactctgtgggcatcacctaggcatctattagaaatgcaaattcttaaacattccttacctcccttcggaatcagaaactctggggtggggttcagccaactgtgtttaacgagaacttcagggcattctgaggcacactgaagtttgagcaccactgacctcaattatccctgcagttcaggaaggtaggtggggtggaaattattgtatctttttacctctggaggaacagcagcaaagaaatgtcacatggccagatggtagcagggccaaggctgggacgatttcctggtctcagtgtgaggcatcccataagggtgttagaggatgcattttctttcaacccacaagcaacccttaaaggagacaaaaattgtgtttggagaggtgacctgcatttgcgtggctgtgagtaagcatgtcaatgcaaactgctatgaacttatttagtacttcttttgctgcatcccataaggtttggtatgttgtgttttcattttcatttgtctcaaggtattttctgatttccctagtgacttcctcttcttccccttctttcctagtgacttcctatttctgtcctataggggccagaaaggtattagattttcaagtttcccctagtgagtactactcagcgcttgggaggtgggtgacctggggtagagccacctgtgtcaaagtaggataatgctataagaatgatgttttaatggaaccgttgaaggcagcttgctgcagagaagctcctgtcataccacaacctgcctcaggatcatgttaggtttaaaatgcaaactctggacgtccttcttgacaaaggtattccaaagggcaggaagaaaggggtccctgcactttctgggaacttctgggaacttcttgggagaagctttggtgtcaactgggcctagtttgaatcccaactctgcccttcgtgggctgtgggaccttgggtaagtcacgtaacctgtccattatgaaaactcgatttgcaaggtatggtcaccacaccgattctctgagagctctgaaacaagccacccgacatgtccgggcctcagttgccttatctataaaatgggcagtagaccaggagcctctgcagctgtaacaaaccgtggctaatgccatttatttacgtaagccccaaataacataacatcaatttagcagaaccctcaacctatgcaatggttttcccattgcccccatcccctttgcaagaatataagctaaatcgcctgcaaatgagcacaatgatcaagaagaaaacagcaagccctgtgctttgtagagcccaccagaagccaaaaataccagccgcactccctgatatcaacttagccaccatagaactgacctgagaagtgctggccgtgagtttggatccagcactagagaagggtcaccagcccagacggacccaagcaggagaggagctcgagcctctaaagttattcttggaataaactgaacccccaaaccctttgtgccctctattactcagaaaactaaattaattagaaccctccattttccaagaagttggggtaatcaaggtttacgtgtagtaaactccccaccccctccagaatagtaaactgaactgatgtttccacaaagaactctacttagtgaagctgctgggacaagagctgatcctcattgaaccggaacatcaaaccatgctctgagacaaacctgatgtttcacttggtttcagtcagtggtgagaaaacaagcagtctgtggggtgatttggggagagaatgcaggctggctttccaggctctggctgcggggtgggataaagatgtttcctcttttcatttccagtcaaccccctctgtgcattttcctcctttttccacacatgctttacctcctccaatgacagccctggccactgggcctttgatcactttcccctgaccttctataggcccacagactaagctgcactgcatttgatttcaggctgtcccaagttgctccttacattttctctgggtatgttctagctctccaaccagattttaagttcttttaggctaggagaactcatggttcctagcacagttttaacacctgcagacacttggtagatacttaaaatcacagacagtagagctaaaaaggttcctgaccttcagtttgcaggtgaggaaactgaggccctgagagcaaagtgacttgttcaaggccttacagctagctaatatcaggggaaaattggaaactcacatcctggcaaatattaagcattttctgataatacataatgtgagtaaggagtttgaggaaacagaaaatccaacaaagaaaatttaatgggagcttaaattggtgcagtctctctggagccaaatatcaatcaaaatgtagaatgcttacatctgttgaagtaattttccttacaagagtgtattctataggtagaattatacatgtatgcagtggatgctcacggagatattgactgtgtgtggtttgtaataaaagaagacacaaaaccaggagcaacctaaatgtcttatcggtggggggtctggctatggcaattagtgaatttctcgacaatgcaatactatgcagctactaaatggaatgaagtagatttatgtacatgctgatttggaaagatccaagatatgttgcaaagccaggaatcaaggtgcatggcagtgcggggagcacattccagtttccacaacagaaagtgtgtgtgggtgtgtttgtgtgtgtctgtacgtgagatatttctagaagaatacacaggaaactgcaccttctggagactgggatggggtctcgagtgggagggagaatcacacttcactgtatacccctttgcacgtgttactgactgcatgtattatttttgtagtaacaatactaataattgaaaaacctcaacaccacagtctcctagttcagcagcattttcctccactgtaccaggtggaggtaccagcagtatccttttttgctgttattcttctgtaaattggtaacttggaggctaattgtcataatttcaagtaggtaatagacagcaaacaaaccatctactcttagctcattcctttattattatttttttaccccaaattgctactttcccagaggatggaggctctagggtaggatgacccaggtggaggtgggtactaaaggattaagaaccagggtctcaaattggggatttactgggcaagtcgctcaggtgctctgtgcctcggtgtcctcatctgtaaaatgaggatgatgatagtaccagcctccttgcatctgtgggagaaatagatgagatcatacatgtatctggtcctcaggaagtgcttggatgggtaacctggacttcttcctctgatccaatgggcctctgctcagggcctgagaggtgagaggtgagcctggtgagcagcacacaaaggcacactatctgtccagtgctctgacccagactgcatgggtcgaggtgcttacgacactgtctctgacctcaaggagctcaggtctggcgcgacgtagcataccacacccactgcatgagggagctcacggaggagcaggcaaaccagggcacatccaatagctcagcaccagctcccaaatggaggaaactggtgggtggaacagaggctgggggactggcagtaggaaaggaagctccaataggggagagagtctgctgcctggccttcctacagccaaggggagctgacagttttggatttgctttgcaagcaactggcagacttctagacaagccagggaggaattttttgagggaaagtgtgatgtggtgctggtaggggggcaggaacctgagttctattcccagggggtatcagcaaccagctaccactcaacagccactggagcttggactggaatgtgactttccttggcctccgtatatctccctgaaaaatgtacgtgcctggacttcacccacagacattctgattctatgcagagcaatacccagaagggctgagacctgcaagtttggtcctgaggggctactgtgaatggtccttggattgttttgcacacaaaaccacctccactcacagaatggacaatggccactgcacagaaccagacactttggttacatcagcgttggagcactgctgaacttttgtattgtccctagagactgcactacccacgccatcctgcagagatgacagccagtcagactctcttccggccacagtccagccttcctgcacttcgggtgaaagtataataaaaagtatttattcataataagactgacatgtacacaggttcttcatacaggtgatttcatttaattctcaccacaactctatcaggcttttgcaatgattgtgtccattttacgggggaggaaactgaggcagagagaggctaaggaacttgtgtaaggtctctggtgggtcatctggcttcagcagtcagagtaggctgctccacattgtataggaccatgccatcaccccgtgcttttcttgactgtgggtgactccaagcaagagccaaagtctctgtggccctaggggagaagcaaatccaccagctgctgcctgcccagcaagacactttaagaatgggggtgggttataatcatcattgtatttccccactccccctaccccctgccaccccagcttccatctcccaaatcaggaggtgtgcacaaagctgggactggatagctcccctcagtccgatggggtaggggtcacatttgctttctggggtggccactttttgtttcactttctcttcctttcctttgttccccttcctcctcctggtggtgacctggtcaccttcctaggagataacgcccgtgcggctctgtcctgacaagccctttcggccctatctctaatcttctctgggtttaggattaatagactttttcctcgtttgggatcaataagtacagagagagagagagagaaagacggagagagaaaggaaggaaaaagtcagcaggattagaaaaaaaaaaaaaggactgataagaatctggtccaggtcgtggaaccctgatgctgccagtagtatctttaagctagggagtagcacaggtgagggaggggtggggtaagcaggtgtcttatctgctgaggcaggagctggggtgggggtcacccgtggaagagcaagatggggtgaggtcacaggcttgtcggtggctctggggatcctcagcctcaggccaggacaaggttcagcttgaatcgttgcccagagcagccctctgaggccagggctgcctgtcctgacaacctccacaggtactgggagacccttctatcccaggttccagcctcagctggggcccccctccagctactcctcactgagcaggaaactggtcctcatactgcttctttgcagccccccaaggtcccttgagggtgtggacagtttagctgagcttgccgccctggagtcccagagtcccagctctttctcgatgcttcacatagcctaatggaaattgcacatgtccccttgatgaggctgcacggggaaaacaaaaatagcacctcgctgcttttagcaagaattatatccactccgtgtggctaacactggttgccgcatgccgatctgcagctctgattagcctttgattaataaaaaatggggaaggaaatcaattatttatttaataacagcagtttgttttaacggcaaaacctttaagaaagtaaaggacttgagagtggggtggggtgggtggaaccaatagtgtctttggaggtgagaagtttgggaatggaggatttccatcatggaagtggcaccgtcctgtgctaggatagaggggccgttccatcatggttttcaggatgtaggatgcagctgagcatgaggggaccagacctctagcaccctgagatccgggtgcagttagggtccttgggtgcagggcagtgagagggcagggcactggtctgctttggtcactgtggcccttccctgcccctccaacaggatctacctgttaactctggtctcaatctctggtctgttaatgctgagaaatcttctcaaggaagggcatgagtgtgtgtccctgtccatcgcctatggcgcacattacttggccttgggtccagacacttgatgattcatgctagctccccttccaccatgtccactgggggtcctccactggcctacctggtcctgcactgtttccctagcacctctctgctgttactcaaattgctttctccttgcagagggcacttctgctgatctttgcatttcacaatcatatccattcatcaaggccaagatcgaaggacaccccgtgcagcagctccccaagtcagcccctcaggagacagcctttcttcttctgaacatcccggcactttgaatgcgtgttcctgtggcagtttggggaaatacggctttgtactttatttctttgtaggcatttggagggcagggactgcatctcagtcacctttgtaaccctcacccagggtttgtggaataacagatggagggatggatgctatcttttggggaggctgtaccccattaacatctgaaacagcattcagatgaaagaccagacatttaagagaaatgatgatagcctctttgagggaaacaggaaatatatgctttcaggcacctgagagaaacagattagaacacttgggtgagggatttgactttttatgttctggaagacaaagtagaaaattaaaaaaaaaaaaggtcaggtgacatggtgttaattttctgacaaaaataaacctagcatgttgtctatagaagtaacagccccgtattcaacatatatggaaactcagttttctcatctgccaagtgggataataattcctgcacttataaggcagttgcaaattttacacaaaagaaaagagaagagagaacctctccaaggagaaagtgctctttacatgaggcatggattatctatttaggtaactgtcagtgacctaaagttcttgtctaagtggctgccctggaaagaggggtgctggacaattattcaggcaccaaagtctttcttcccatctccattatctggatatctctcatggaagctaaatttcccagaattatctgggttgttgccattactgtcttctgagcttactggcgtgggcggccacttccagaacgcagccttccagcaagctggcccagccactccagataccatgcccttgagtttcagccaggcacgtggctgcgggtacacggctgcttacgcacgaatgtctccttccattgctggagagctttgagttttcctgtcttggttcacagacattatcccacgagcttgtcctcatttccctgagtgtgagtagggaaccccagagaggagactggatttgctgagccacacagaacctattagactctcttttgcctccactacggcaggtgagaaatttgggaatccggagtttctaacatggagtcaatgtcttggcccctcaacctccccagcaattggcccatacagcaggggggtgatttgagtgggggcccttctgattcagagaataaatcacctggtaattcaggggctggcttaagaacatggccatgtggagcccccaagctcataaagcagatgaattaaagggcaactattcacatggcagaaggattcttttatttctaaaaggatcccttataaggctcttctggtgagcaaacacagcacatttcaaataagattcattgtaaaatgacaaaaaagaagataataacaatttgcattcactatttcgggagcagctactgtgagaatggaggcccacctgtatatcatcagagctcctgcatgtccctctcctggagaaagtggggagctgcagagatggggagaaattcgggggatggggagaaaggcattgccgtgaccaaatctgtccttctctgacttggaaggaaaccttgtcatctccacgtcaggggaaagcagtggggtggtcctggagtcgggggcttggttcggcggattattggatcctggctccttgtggtgtatggtggagttattccagagccttgaagcgcaaatgctgtgaagacagatctgctgacccagccaggactgtggacctggccgctgggccccgatggattccccgtctctcattccttactgacaggctcctgggtattggcaatatttgccttatggcatcagagcggcgtttcccgtattcacatagttaaattagttagctggatagaaacctcagagatgatgtatctagttgtcagttgtgacttggtgctaatggcactacaatttggttacagtcctcgccgtcattaatcatcggcccctagctggctgcatactgggtgctggggagggggaagggcagggctggcttgggcagaaggtgtccagcacccaggctggggctctccctcttcctctgggtggggcatgggctctgtcactgggcaggccgctgtccctcggtccccaccggcaccactgcactagccctgcacacctctatttattagcatcatgctacttatgctaatagcagaccgtacactatttctgagcattaacatctgctccaagcagccgactttcacttacagaaactgatttcagctcagtcaagcagataaacagagaaatcaaagcaggtggctaaaagtgaaggaggaattctcaattcctgcattcaaccgacgaacttcactaaagccataattaatattcagataactatattccgacacatagaataaacaagatcatttaaaggatgcaaaatacatccccagggccagaggggaagagagggaggggaagagaagggagggaaggcagaggactgggtatgaatgcagacacttcctgctctggcctattgtctggtcggtttcagccttagagaagaggtgacatgcctcacagagccgggtgtttacagaaccccttctgaaagcgagcaggggctggggctgcacagcactgttccaggtcgtggaaccctgatgctgccagtagaagcaagagaaactgaggtgccatgtcccaaaggcttgcgatgtctacatggcaggctgacggaaagctgtcctctgtactcatttcctcacccttgaagctgtctgaaggcatggctagtcctaggcacctggctgccgtgtggcctcggatgggaggtgggcctccctgcacccaggtcttctccaacaatagaacaccatgctggaaatcctccctgactatggaggattagctaattggtgattctggaattaaaaataatgcctctgtatgatttggaccaggtggaatctgactctttagattaaaatctacatgacagtacataccttattggcgttatttattgtctttttgttgtttttcctagtcagtcttttcaaaatgttaaaataagactgaattcattgtacggaacaaattctgaagacaattgctcctgtttcaaagagcagtggcccagggatccgaagttgcagactttccgagcagctcccagtccccacacaactctgagatctatatggcaaaattcaggagccacctttatcatattagtctacagtgatcatgagagtagcaggaagagttcacgtaacccatcacttgacatggtacacgctcccctgtgtgcacatgtgggccgttaggtaatacacgtgtattacttaagagcgtttatatgtactgtgagctccgaagggatagtaagcagccacgttctgaacacgggattcaagccagccctgagcacccctggggaaaggggcggccaccaggaggccaggccacagaggagcatgctcaggtgagccctgccatcacagtgtggagatccctacttggatccacactggccacgcagcgagagagaacacgattcacttcctggtaaaaaggaccttgctaacctttcctggtctctttttgggttcctctagtctcgagggccttgtggctgaacaacaaatgttattgaaaactttaattcctgtttttggggaacatccatctccctccccacgcccctgcacatatgtcctgtttatgtctcttcctctgaggatggtgctgacagtgctgggagcccaagttgcatcctgggtgtcatcaatgctcctctggaaccacttgcattgtggttgaaatttcccctgacgcctggacatttttttgttgttgttggtttccctggaaatgacgctctctgaatcacagctgtttggagcaatgaggggaggtgggaggatactccctggaggggtgatgggaggggtggggtggcaaacaggcttttccagggaaagctgagaactgcacaggccagaatggttgtggggtaaggcttgtggtcttcagagtcccaagggacaggtgttagggcgaatggtgcattggaacctgaaggactggaaactctttcttctctagagtctgactctcttctttgtactttcctgtctcccccactccctcctaaaagggaacttcctgagcaacagccatcttctcagccctcggcaaggggtccccagctacaggtctatgcagggcacctgtgtgctgctcgctagcgccttttctccacgtttttgcctaatctgagcatcacaacatctgtgtgggatgggtgaggcagagattgctatttgcattttacagatgcagatagggagtgggggaggtggtggcccacctgagatggcactgtgagacaggaggagccctggccccagtccccaggcagcaagtccccgcacatcttgcacttgctccctcccacactccgccatcaccatcacccccatctcccaaagccacaggctcgtgtgcaggcggcccaggctttcacacgctcacataaagctcccaggcctggagggaggcttggaggacacctcccagtgatgtgagctgtgctctgcgaagggagagaggagatgccccaccttgccagggggtgctggctgactcacttcacaagattcctacacataaagccaaggacagatgtgatctgatgtagcacattccctgggactgtcccacagcacgactggcgggtgtcataggtcacccatcctcagcctggctttcccgacccttctggccactcagcccttacctgggctttcttctgtgccctcgcctctttgtccctggcatttgcctcctcctcttgtatttgtcttctccccttacattttctgctgtgcactcagttatcaccaccttgatcatgactttcatttgaatctccaaactgtcactgcccaaaccaaacataggctggttctcagagcaggaagaagaaaaatcgaatttggacccaattcctttggagtttgggaaatcgcacccaggctggactgaaggggccctgtgtacacgctgagagcctggcattctcggaggagaatggtgctctctatccaagagaaagagttcccagcaagtccttgggggtgtctttctgcaaaagggcaacctgagtgctaacttcaaatggcctttatgattaaggcagggaggccagttcccggtcgggtctctgtaaaaggacatggttcctctgtcatgcctctgcaaaaggacatgaaaattacaggtcttcggggaccatttcaggctgctgtctccaccccaactccacatgtgagcctgacaggggctgtttattttatttccttgcttcgctgtaggggttcagggatgagccccggaggtggtgacagatggagacacccctccctttgctttctctgaaagtaaactaaagaaaatacactcattttatgtccgccagacacaagctcctcctgggagaaaacttttttattcaacctgaggtgcccacctgatctgggagggtcttgggatttctctcgtccaaccaggcctgcctccttggagccctaccctccacatggaagccgcggacgtgactccccgacctggtgtcccatcatgggctcaccccacggggctgtgtgattggggcacagacatttgtgccctgtgccccggagagtcccaggcgctgaatccagctctggaggcggccggctccttggtccgggttgtgcagtagtcctggtgccctctgctggccacgtctgaaaacacaggcggcctctcgccgcatcgggcggaccttccgggaggccagagggatggcggggtgggagggcggcctcctcatcccaggggatggccctggtctctcctgtgtgcacctctgaggccctgctctctgtactgtgtgcctagggatgcattcctttttccttgtctctccatggaagaaagacctcacacctggctcgattcttcactggctgtgtagccctgggcaagctgtccaacctctctggaccttgttttgctctctgaaaggtatcacccatcttcaaagtccattacaaatgccagttcctgtgtgtaatcctctcccgagccgtcttacctttggctgctgaggcctggagcctctctctctggctctcgactccttcagggcagaggctccttcctccctttttgcttttctgaatcccccaagcacccacaacgctgtctttacccagagcaggcactcactcagcaaatacctgttgaattgatttgtgttaaaatggctgcctgggactagtgattccctcaggtgcctcctctgctctgattctttttcattccaattgtcgcttgtgggttggtctcattcccaggtgagactttagatcctagagggcagtgtgagggaatagctggcctggtgctttagcgaatatagaaagcaattctgacattgtggagcagttacttacggggttctctctccctcactcagcagcacatttcccagagcccgactggaagatccaggctgtaaacaacatgctaaggcgggactcctgctccgttcctcccgtcacctcccgtgtgcctcccctcctggcacctcctcaccccagcacccctctctgcggagtctccttccctggccggtggggacccctgctgctcccagcagctccctccctgccccaccctgctgctctcaggaagcagtggcaggcttgagaatgaagcaatcctcggtctcatcagggttctcaacgccctccccgacatgacagactcttctccaaggctgctcctgcgcagcaaacacactgcctcttggaaacgacagtaacagctaatgtttattaatagctcacagtgtgctgggagcctctccgagagctttgcacatattatctcatgtaatgcttctaataaccctcaacaatggctctgttattatctttattttataaagagaaagctgaagcacagagaagttaagccacttgcctaaggtcacccagttagagagtgggagagcccacattccaagccagacagtttgattccagagctcttgttcctgacattccttcaggcaacaggatgcctggggtggtggacaagggctgggcacctctaagacacacacacacacacacacacaaacacacacacacacacacacgcgtgcacgtgcacacacagacacacagcctaaacacatgcacagctgtgtcccttgtgctgtgcgtgtgtgaacattccagtgacagtcacacatgcccatgtgtgtgtcttcactcatgcactcttgttagtcagtgcacacgcaatgctctccgcactgtttgatagaactttctggcatgcagaaaatgtgctatgtagacagcacagactgcctaccactgtagcccctctttacttgtggctgttgaaccctgggcatgtggctagtaaaactgaaaaacggatttttaaattacattggaataaagttaatttaaatgtaaatgtaaatagccacacaccgctgttagctaccaaattggtcatgctgtcatgggcttgctgtgaggatggagagaggtgatgatcaggtctcatgtgcagcgcaggcctggcacattagagagctggacaatagacatagctttattaataactacccaattataacagtgcatatgcattgatgtgtgcgtagctctccctgtctccacctagccttgcagccagacaccccattattctttaccagggcagttgaataccaccctcctgactgtgggctcagaccccagagtatctctcaaggtgacaaggaaggagggcttggctctggagtgcctgtgagagaagtttggggtggggacccaagtgcctgtctcacttgctggtacccaggaggatgtggagaggttgcctgtggccctagggtcctcccgtccactggctccctggccccagcccagagcctcccaggtacctgggtgaatgattacatctctcatttgtaagtaaaacagcagcgtctctctttgtgtgttgcttttattgtttttttactttaaaacagggaaaacgggccagcggtctgcctcaggcatttggtcatggctctgggggccaaagagaagttcccaaggagctcttcccttctaggggttcagagaaacgagccagcacggtcaggctggtgggggtggctgggtcgggatatgtgggccacaaggacacagatcgtggggcaagctgggtgggaaggctccagacgcagcagtggggcagggaggagggagctctgcgacctacatcaccactgtgaatctggctgactcacccctggacagcagttcccgctctccctgctgcgtggaatgcaaccttggcatcctgggaaagatgctccaagaaagggcagcagcagtggccctggcaagggctggagggaatgaagctacagcatgagggatttaggtgggagcatgggagggacagagctgggctaagttctgtgagatggtgcaggacaatttgaggcaggaggaacagtttcctttatctcattcattaatgacaaagtgagggctggcagtgtcagtgtgggtgagcacctgcctggaggtggagtgggggcatggggaaggaggactcccagcatcctctgttctaggcttcacgcatgcatgacctcatagtgtgcatcacacagtctgtgacctaattgatgctcagtccacactgaggaggaacaataatcacatctaggaagtcttgtttaatttgttctattataaatgactttaaataccatgacatattgatgcctctcaaatttatacctccagcccagatcaccactctgagctccaggatcatattccacctgccttcctaatgcctctccttggacatctaacaggcctcccgctctcagcaaggccaaatcagaattttgatcatccatccctaaaacatgttccttcccagtaaacggccccactcagcactgagtgcctctattcgtcctgggcgcctctctttctccccacatcacacccaatccaccaacaagtcctgggacccctatctcccaaacacatcctgaccccgtctgtttctcgcaccttcactgcccttcttaatccatgccccaccattgctcctctggctgcccccctccgtgtctgctctcctatagcagctggctccacacagcagccgaaagatctctgtgaaacatacatcggaacatggctcttccaacacttcttgctaaccttagaaaacaattcagacacccctgccaggcctgatacaacctgcccccaccagcccctcccacctaattctccccattaccccaggacacgcctgtcacactgctcttcctcctgtctcttgaacacacaaagcccattcctgcctccgggcctttgcacctgctgttctctctgctggaagtgctttctcccgccatgtctgcttgttgtttggatcttggcttcactgtcagttcctcagaggagccctccccactgacacgtatacagcggccccagtcatgcctcatccatatgttttaattctcagcacaacacttatgatcaggtttttaattttaatttttaatgtatcatctgacttcctcatgaaaatgtgagctccaggagatccagaggtttctgtgccatggtcatcgttgtgactccagcagtggcacagagtgggtgatcagtaactgtttgtgaatgagtgaattattcaatcctgatggtgtttgtgggagaaggccttctgcctagggtagaagtgggagctcataaatgtgtttcctggactggctcttgtgtacgaattgcaagactaattaaactcatacatatttgtggaaatgcaaatataattttatttaccaatgactgtaataaaggtaaatgctccttacttaaacaaacaattcactttgggaatagagctgtaaacagaagcaataaataaacactcgttattgagtgctcgctgtgcacccactgaacttcacgagctggctgctctgatcttccatggtggcatctacacttaggaaggctgaagcccagtcatgaagacctctactccctggatgtgggtacttaaccacaataggcacaggcgctcttccccaagcgtacgactcatgggagcatggctgggcatcttggctgtgccacttacttgctccgtgccctgggaagttagggcagttaaactctgtgcctctgtttctttgtctgtaaaacagaaattgaaatgttctcctaggaaaactgggaacattaaatgagatagcacattagagcacttggcatcatgctggggatacggtaaatgataaatacatgttaacaattcctctcttattattatgattatgattattatcattatatgagactattctagatgtttctacattttctcacttaattgccataataactcatgaagccagtgttgttattcttgacttacaggttaggagacgctccaagctccaggaatgaaatgccttgcccctgaccattgcctggctctcagacatgaaaacccaagtctctgggctctagatccagtgctctttctacgacatcactcctgcctcccttgaacttggttagagcccaatactgatgaggactccccatcacacccacctccattttaactcttcaatctctgcatggactcagcacctctgactgtggtctctgagcaacccctcaaatcttcccatgccttcccatccccagcctccaagagctccccaagggttgcaccaccctggaatctgaactctaaatccagcatgaactttacatcatagggttagaggctgtgaaacaggaagcgttcttcgaggtgacccatttcattcccatcccgagaggaagaaatggagctccacaggtgcccagtgacttactcaaaggagttcctggactagaatgaaaggcttcctccctcctccaaacccaggccgtaccctgacctacctcccccaagctgggcatcttcccggccatctccccaagcaggtgagggacacagggcctctcaagtcaggttgttggtggtgggtggcaggggctgaatttacttttgcttgggcatggctttttttgtgtgttacctccccatgagtgtgtgagcctcctgggcaggggctgtggctctgcctcctgctcctcacatgatgtgcagcccagcactgggcacagtgtgggtgagcaagaacgcagcctaggttgcatgaggcacctggctggaaccagcagccggacctaagcacaatgaccaaaaccttcacagtcattatctctggggagtgggaatatgggtgtcctcttcttgctacattgtcatcttgtttattttttctgtgacaaatactattggcaatgaaaatatttacaatacacttagtattgaaaaaacaactggtcttttctggggaccaattgatggcccctccattccctctagatgaatgagagaggccgctacgtggtctgtgccgctgggcagggaggctgaagctccagggaggctgaagcttgggggactctgagagactgatggggctgcagcagttagaggcttcctggaggaggctcggtgcggtctgtccagagaagcaggccttggcttgggggaagcaggagtgaagagggtaccccaggtgggggaatagcctgagcagaggtgcagagatgcaacttacctcccaggaagggagggctgaggtaagggcaagggcggcaaggccagggatgtcctaggttgtgaactcttttacttcctttttttttttttttttcatttgttcaacagctacaattatctcaggctcactatgtttcaggctctgtcagatgctccaccgaaatcactgcgttccacgttcacaagcagctcatctaggcagggtgtaaattcccgtttgctagacagggagattgaggccgaccagtaggtaaagggatttgtccaactcacacagcttgtcagcggagctgcggggctggacctcagtgctatgcattgcatggcccttgtgctgctttcaaagcctccactccccactgaatggactctgggaggggctgggaagctgtgtgaggtgctgagcaggggaatgacttcacagctgggcacagaatagcttcaccattgaaaacaaagaacttgcacgtaatatgtcaccagaggagttggctggcctgtatgtgggtacgtgtgtgtgcttgtacgtatgtatgtgtgtaagtgtatctgtgcatgtgtagctacgtgaggatgagaatttaagagtgtgagattgggatccacttcctgcaagtggggaagacatgtctgttatgacagttataacaacagcctaaggaatcggttttatggcataagcagatggttccaaaaatgtaggctgtcattcccccgaggaagaaagctgagccccaggggccatgaggcaagccacagaaagttaggggatactcaggagggtgtctggttgaggcctgaggaagccgcagcattgttgacaacttggacagggagctgatcctggggctccagggacaggcaacgtgacatgcatggagacccctaaagctgctttccaacttgcagattcctttgcctcatcctcagggaattcaaaagtgtggggttgaggtcaggagcttcgtttcccaccagaatcccaggagattctgatacatgtgttctgggagaggctgggaagggtcagggtctggcctcagctgcaggaagaccgggcataataagggcaccagtgcccaacagcagcttgctgcagatgcattgggcaaagcacacagcctgggtgtgaggagcgggtagtgtcctcaggggcaagagtggtggggcctccagatgagcgaatgggtaaccaccagatctgtgcctgagatcccaggactcctgggcaggtaggactggccttcctcctgctgcctagtagcaaaatgactcacgctggagccagaggtgggctggggccaggcttggggatggcctggcttttgtgcctgcaccccaagtagctgaattcagcctccagggggcccagagatgaggcaaagagaataaaaacatctgtagctggacacatgggctaggctcaggagatcggtgtttctggacagaaggacaggcccaggagagcagagatgcatttagccagacagcatctccctgggccccactctggccctttcctcaggacacgttgcttccaagtgctgcctctggcctcgctggtcgagtctgagcaccatctgctcaagcctggatggaggcagtggggcaggggcctctcttttcctgtggctgccccgtctctctctctcactctcatatgcgtgtgtgtgggcatacacacacacacacacacacacggccctgcacttgtggctgtctccaagaagagacctcagggctaccttctggggagctgaccccctcttcttccggtctcccagggaatctgtgggcagaatgtgagaagatgccacagatggcccagccatgcatccaagaaagtggcgaggtctctggaggacactgtctgacttagcgtcccacccaactaggttgcccacaaccacacgtgtgtggagccctttctccccacatacttttcccacactcctcccctacaactggccagaggcccctcaaaaagacacccacgctcacacacatttgcagagaactgcaggcgtgcccacccagggagttggactcatctcttctgttttttacatgcacttggtagaaactgtagtcatagacgtacacacaatctgtcactaaaaattggcccacccgagcccgtcgcagcccacacacacttgcatacactcagcatgtatgagcatacacgtccgcacatctcctcatctcctcgcccaggtctcacaggccgggattggagtgtactcacttggaagtggtgtgtgggcaggtgcacacatgctcactacatacttgcacccacgcacatgtatgcgcacacacacacacacacagttctcactgcagctgcagagtaaaaggctaccaattccagaatcctggtcagactcagagcacttcattcaggctgtggacagacgtggtcctggtgtgagatacctctggaccctgagctgggagggaaagggtcgggctctgccagatagcaagtcccaggataagggagctttgcagcctgggaggaatgaagacagccctctgggcatcctcccctctctttccagaacagcgtagaaaacacagctctcccacacatgacacacactgacccacacagcaccaacacacacgtgcatgctccagcagaaccacaggatgcagtgtaaatacaaaacccatgtctacaacatgaatctacatggcacacctctagcagacacaccacagcctgctctgtgccatagtccccagaggtgtccaccaagcctcaccccttgcagccagctggcacagtttgtctacgcaggacagggcaacacatgcagtacctccagtgacaacccctcatctctcctgtccagcacatgtagctcaagtcagtactgcgaaagaaggctgccccatcatcccgggacagactcaacttccaaatggtcagcttatccagcagatggaggaaacagagaagtcattcctggatcctcaggattttattttaaagaaaagaaaaccataggtttcctgttccctggcgaactccttacaacaattaaccctttgcttagtgtatgtgtgtgtgtgtgtggtgtgtgtgtgtgtgtgtgtgtgtgtgtgtattctcttaatacagctgagcagggccatcttctcttccaaatgtgttcccatgagccaacaggagcccccccaggctggagcagccttgggtggacggctgagggctgggtgtacaaaaaccttctttctcactcagccacagccagaggtagcctgaatgctggtcaccaggagaggctgcagctgtagacctaccctgctcctctccttccttcccagttgccaccccctggaggctgcctcttctgctcacaggcctccccttacctacatgagagctgtctatagccagtgcctggggctgggtggctcttggaaggcctgcccaaaatttctccaggtcctgcctttagtcttggttagacgaacagaaatttggccaagattctgtgggttgacgcagaagggagattgcagggggagtgctctcagcaaatgccttctgtttatttgctgacttctaatgaggatttggccacagactttatggggcccctgtgttcccgtctcccttccaagctgggcccctgtcatctctctctccaaaccagctgcttttacttcttcttgctaaaaagttaggtggataaattgtgtctctggccttgtggttaattaagctttgtctttaaggagtggtatgtgagtatgtgtgtctgtgtgagggtatgtatctgggtccgtgtgtgtatctctatgtgcacttctttatgggtgccagaatgtttctatatgtgtgtgtctatgaatgtgtttgtgaatgtgtctgcatttttgagtgtgtgtgtgtgcttgcatatatgagtatctatatgaatgcctatttctgagtgtgttcctatgggtgtctgtgtgtactgatttttgaatctctatgtatgtgcgtatctgtatgagggtgtgtctgtgtgagttatctctttgtttccataaatgtgtacacatctctgtgtgtgtgtgtgtgttttttcagatcctccatacaagacagtgtgtgataatttaagaaaacattagccagtaatgtcccagggcttcagttttcccatctgcaaaatgagggagatgtaagagatgatctttttatttacttccataaagggagcatgcagtcaaggaagcgtggccggcttgagcatatgaccaatctgggtgtatctaacctcagtcgagttactgctctccgagtttccatttctttggcattcaaaggggcacagtgacatctctatcgaagctttgtcacgaggatgtaatgagataaaacaagtgagaggctgtgtgtgtgtcactgtcacgtagtaggtgcattgccaatatcccttcctacccatcctcaggcctttgtgccgccccttatgtgctgtttccgatagtgagccggaccctcagagctgataggggtgctgataggggtgctggcccttaatgcatgacagtgaccctggacattttaacttttgcaccgtgttttcccttctcatatgatcctcacaatgaccctaagcaatgggttgagcaggtgttgctgcagtgatgtgagagcagaaggcccaggctctgagcaaggaggtgaggacactggtccgtgcgggagccagagccagcatggggcaaggacccaggcatgtggctcctacgtggagtacatccttggcgtgccagctacctctgcagcaggcagtgtccaaggcacgaaacactgcccacccccaggagccctgcaacatccaggccacccctgaatgatcagggccaagctggaggggcctgtgcatgagccccagtcacatgcggaccgtccaccgaacagatgcgtggaaacagccctcccctcaggaatcagaggggtgactggtgaagcggggccagtcgctcccagagctggtcctgattatcagcaggaagcagactacccttctcccaaacagtctacgctgttgtgggtgcccaaagccagatttattagcctcatcactcactttatttaaaggatttgactgtaagtagcatttgctatttttctgaaatccaaaccatcctagagcagtatgaccaggaccctggagaacagaggagaaggcagcctcctgttactgtatgggactagtctcatagcaagagggcttggaaggggtgcactcacttgtacatttaactttgggcaggtttgagacagggaaaaaaactcctactccttgaacgaaaggttgccctttggccaggggctgccccgcaggccaggccttacgaatctgcctgcctggtcagcaggtacacctttgcccctgatccctgattcactggtgaccccttccctgccttgctggcacacatcctgagccaagccattctgccgtatcctggcaggatttgactaggttgtaattttccttcatgatccctttttcatttttctttataaaaaaggtatcaactgtacctggttgcaatagggataaaaagaggtactatataagaaagtattttacagattaaaatgctatataaatagaaggcatgctataatataaataaaatacataatttaacttctatgatacagtgcacaagatgcatggttcaactttaaatgaccaaaacacttttatatataggttatatatatgcagtataacctatcacttaatctggtatataatgtggttgatagtatgtcctgtgatccatacaattatataatatcttatgacatatcatatccccagctcagagaaaagtagaatcaaaatcagtcgacattaggctattttggcattcgaaacacaagccccagatttgtgattttaacagctgaagctgggaggaagaaaactaaaaatactaatggggaagatatctccatcaactggcaatgtggtccaatgggtgggggggggggatccgtgggaagaaagaaaccccaagaataggtctggggagggggctcagcagggaaaggggcctctcaggaggagctggaagagttgggcttggcagtgattgttcctactatttatgaagccagatgaggagctatagggcttgcagtggcccctgtgtctgctgattagctggagattatattgatgatgtaataaaaattcactttgtctattaagtttcatcaggacaatcagggagagattagataaaaatcaggggaaatgaataatagaatggaggaggaaagccacacatcccacccatgctgtggtctctgcctgcctctcctttttcctgcccccaagggagcatgaaccaagaagcccctgccctgtacccagaccaagctaagctgaaactttcccagagttggtgctcttaaggagggacgtggtgttccagatatgacgttggtttaagtttacggaccatgtttaatatttgattaaacctttggcatggcagcctctgtgatccgcaggccccactgggagcccagcaaagagatcagcccgtccgctggctgcctgggtccctctctgctgcagcaggggaggtggagttctgcctgggcaacagagctggaggccgggcagacctctgctgcctcccagtagacagaggtgtccctgcctcacgctggctccctctggcctggcctgtgccagaaaattccccccgattagagacgtttctttgggttaaggactgggctctaaaaggtccctgttaaaaggcacgtggcaacagagatggtaacgcattaatgtccattagccaccagggacacatcggcccagtttgatttgtcagaccaacaaggggcaaggcattgaaatgataggaaaaggaggtcacttttggttgggtaccgttgcttgagagccctcagtcctggtttggtggcctgggggttggggtttgggacttggggtggggagtgtagaggctggatgactgggaactcggagggtactggaagaccaacactagtgacgtccatatccctgcagggaactgagtttttcagtcactccagctctatgactgagcccagttctgttctcccctgagaaatccctggggtcaggaggatgccaggattgtggtctgtggaaggtccataagagaggaatctccctcccctaaagagccagccccaaaggccacctcagccatgactgcccccctgggctgagtttctcttccagagatgggagaagtacgcccattccactgctctcctgcagtaaaaaatgtctgctcaggacgttgcccaggtgtgctgttgacaatgggggcagttcttcctgggacctggcaatatttttccagctgcaagaccagtgtcaccccaggaaactgtcctcagcttcatccccatggcctggctgccatccagccactcctgtgctgggggcaggagcagagtaagggtgagggtgcaggaagattccagcccctggaatcctatagtgtattgctcgggatgttcagctgagtgagtctgtggggacaatctgaatgcctgccttggtgacagcaaacatggccacgggtttaaatattccatgagtaatttctcagcccaagtgggctgcaattgggacagctgaaggacactgcagacccaaagcaggtgaggatagccctggcagtttcagtgtgtatcactgacttcttcggagtaacagcaacacacccacccacccatgactgattctccctcagccaggctggcggcaggtccaaatttattcaaaatgagaaattcctttgtccaccattctaagaatgagacttcattgcagagggacaaaaacaaaacacaatggaaagaaacaaaacacaactccccgacttgtcagctctccagccttcctgctctgtcccgttcccatctgccaggctgggcttatgccgtctttctctatgtgggaatctggcttagagccagtgcccctacctgactacttatctttcgggggttcccacatcccccctcaacagcgtatttacacgggacagttttatgtttgtggggttgctgtcttctatcacatctcaagttatcttgtggcagtgaaagcgggtcccccaccttgtcggaacagagcctgacactcagggcacctgaattggacatgaatctgcacctccatgagggaggcctatgtctcccctgtcagaccctggggctttcctgcagggggccatggtatgtcccgccacagcctataatttcctacccactccctgctctgcagaaacctgcctctgcgtgatgagggtgagtgtcgagaggggtggtggcatcccagaagtcaacggcagttggttcagtgactccccaactcccgccccagcaggctcctcctccagccttggctggtctgcagggatgctctcctcctggctgtgtggcctctgctgcagactagccctcttaatcactggctcagccaagacaaggtcagaacattccaagttaatgttttgctgagaaacttgagaaactaagggagaaataaaccaaagccctggtgatggcataaggggcagatgggggtcttgaacttgaacacaaagggtacaggagcctggctttctgctggctccagctggatggttcagcctgcatgtttggcccttcctgcctggcttcccacgtatctcagctggggtctcctggaggaagcatgtcctctgcagctggtgtgtggctggtcagcccttcaggagtgtgatctcttgctctaaggcctgagctgctgttgtgacgtggtctgcccagtagtcattcaccacagctcaacaacgtgcttttctcgcactgagacatcaccctttaacttgctgttcctctcttttccctggggacccaactcagctgccgggtcccaggcttcgccgtttgttcctcattccagatttccaaacttgcccaacagaatggcaacagaatttactctaaaataaatgtaatcatttgcttattgaaatagtcaagatgacagtacagatgaaggtcctgtttttcaataaaaagattttttttttaaaattggataagaaaatgagcctgaaaataagccagtcatactctgtgtctttgtcactctgatgataaactgggcttaagttgctctactggggcctcagctggaccggggtggtgagtgtaccaattgatcactaatctgtgggttctccacccaggcccatccatttcatcacacgtagcatatgagtgtgccacgtgtgtgcgtcttgtgggggcatttggagattcctttgcagaagttccgggacacagcagtttggagttggacccatgtcaggccctaagtatgcaaaagattctggtgctttgctaacaagtccccaacatatggaattaagaataaaaatcacactaaatcgtagactgtaattattaatttttgaaatgaaacaaaactcacatggatacagaaatgacaatactttttgggttttctgatcctcctctctggctttgcggtccctgttttgctggtgtcccaggctcaggcccggcttgtcaagtgagggaaatgacgtggagagtcccccacccgcgcagggagctgctgtgcagaaggagcagccaacactggccagggtaaggggtagggtgcgggagaggtttgagttggagctcctggggtgaggcagggcctgggctgctgcaggagctgggcacttcagactggggcccgcagtgtgtgtgtaagaagttcttcgtctcaccgtcagagggcaggcgacagctggaggaaagaggaaccctcccctcacacgcaatttaggggcttcctccccaggtatgaaaaaggtgtaaagaagtggtctagcttctgggctctctgctgttctccctagagctacctagagccaggccttgtggctgaggaggggagagggcactttgggcggatgactgaatgctggtgccagaacccacactccccatataccctctgaggctgtgcccagcctgggcagggatgggagccagtccgggggcctgggaactgtctggggcagcctcgggggctggggctctgcaaggaaggctgggttgtgtgcactggggagggaacggcagtgacccgcagggctctttgtcccgcaggctggatgtgagcacctgggtgggaccctgactgtgcagaggccagcggaccttcttgcctcttgatgaccctgggtgagtgggagagcaaatcaaaggaaggtaggatgtggctggtcaactggggcctgagctgtttcttatgagaaggggagcactctacctcaagcagccccatctcccattccagcgacaggccccatttacttgccctcctttacaatcaaaggcatcacccgcccctcatcttagcagcccctttcttattcatcatcatgcccagcatggggcctggactctaaggcaggctccctttcagttgccttgacgactctggaaacagagaatgatcaaaaagccagttgggcctttggctgtcaccagagacacttcctgactgccctctttccattctgaggagcgcccagacacgggggttctctccttttcacttcttccccaggacatccttccaggtgttatctatggctgccaagaagggccagggacgtcctgagacagggttcttataagaaagagagtgaggggtccaggactgccccaagagaattccaagccttcccttggaaggatgcaaaggctttccttctcagtcactggggctgaaagtaagcctcagtgagaaatggctttctgaagtccaagatattcccaccctaccagcaatgctgacagggcagcaccctgagtccctggctctgctgatcccaagaatttaatcacagtgattgatatgattgggggcctttcctttcctcctgggatacccaggctgcagagtgcacactggcatctcctggagccagtatatcccaccccaggaatgggatgtggcttcaggctcatgccacccctttggagagagacctcttcacacagcgggggcaagcatgctttccgtgcctcatccggtgagaccaagccaagccaagtattgatttgacagaaagatatggatatactggatgcataatggttaggggatcctatttccttcttttcctgttcagagtacacctctcctccaccccaccctgttgaaaagcaaaggccggatgagggagagtgttctcaccggtcactcagggacgcctctgtttccccggtctccttgcaggagttcaaaaccataaagcctctgggaacaaggaccccctctcccaccatgaaaagctctcccaagatcttcgcctagctgtatattcttagaaccagtcaatatgattaattttacatgggcataatttccggctattgctgtggagtcctcccagcctcacccatcaacagcgacatgatacagtttctggttatattggtcaaccaagatattgatattattaataatggatatctatacgctgacctttgtccacacaactgaatcactctgggctggctgtcacattgctttaagaggtattgataagcccattactggaagggcacatacaatcttaggtatatacttttcactcaccttcaagcatctcctgtgaaaattgacctttgttgcatgaactggtgtgggtaccatggcatgtggtatgcaaaagaatgtgtgcgcatatgcttgtgtggtgaatgtatgtgtgtgtatgtatgcgagcgtgttcacgtgtatgtaagtgtgcgtgtgactgtgtgtatgagtgtgtgtgtgtgagtctgttttgaacactgttccttttagagctgatcaaatagtcagttacagcattatagggaggtagcagaatcacagagttcctacaaatacactgtgatgtagcgtttgatctttagatgcctcttgtctccgaggacttgcgcaaggaggcttggctttataaggatattattaggttgatgcctcattctctcaatttacctgccaggcaagagacagcactcactgggagcagtctggccagaactagccactgggaggtgcactgaagaccatgctgcaggcttgactttgggcatacgctactctgagcctcagtctctttatctatgcagtggcaacagttaattcagctctactttctaaagaccagagaggggaagtttactgagctcagggtctcaaccttctgcaccaaaacttccaatcatatgaaagcctggcatgccagcaggcctgatttattacatggtgagatgtggccctttaacttttagagggaatgggtttgtgtaggtttgtagtagaaggcatgctttttgtgcttgtgtgtgtttgtgcatggtcacacagacctcattgctgtgcatctctgtggctgctgttgtgcctacctgcatggaaggtggtgtcagggtcagtagcctctatcagcttggtctacagtgagtgatcccatcctgtttgaactcagacagcctcacttgtcatggatgcccccttgcttgtccctgtaaagggaaactggctagctggagagatcttttggatcctcagacatagtgtatgaataaaccagacatggattaattaggtgtgactgcatcattaaattagaataatgaacaaacagccacgtatggcattcaaatctgcctagaatgactccaagggttgctttcaagtaagtcacctgtcagtttgtaggttttggggactctagagagtgaggctcctgtcacatcttaagaagtggcttctttaggtactacataccccaggtgaggaccatccttcagtgggcaccaagactccacaactgaatccaaacaatgacttggttcaatacagcatcatctatgcatgcttcagctgcaagcatttctcagtgtgaaatacgacagtagcacaggtgctcaagagatgggagggagaagttaagaggtgtgggcagcggatgtgaaatgtattgatcccacaatatttatgtggatgtgcacatagtcgcttgtgcacgtgcatatgtgcatgcacacacaccccccttttgtgtttctataaactcctttttcttctgctgatactccctatttcagtcagattgattcaagggtgaaccaagttgtgtaattttaggaacagctgctgaactgcagcaccctgccctcggtgcacaacagttctcacaatcccggtccttgaacacagtggctgtgcagaaaggattttttgtctttaacaaagaggaggaagccaacagctaagagggaagaaaatgggaagctagcttgccttgctggccagctgtggaatagtctaatacatcggggctttgttcaaaagatgtgttaagtatctagaaacctttgatctgtagccactcttaacaaaggtgataattaattaaagcagagtgcattgcaataaagtaacatcgcggtcagtttatgcgttgtccagagccggccttcggaagtctctgtcaattaagctcttgtaggaagccagttcattatcaatttttttcctgagtttgatcaatatttttggctgttctgtccccacagaagcaggactatgtctctctccatgagggcacccatttatttccatcttgcagaaggccacataggatttgttcctgagctgagctgcggggaatcaccctgtttgaaatcctcgatcagctcatgctagagaagagatacaaggaaggataagagaaaccaaatgtggaacaagtagaaggggagaaaccctgtaaatggatggtcctgaaaacatcccttttacttttttttttttttttttttttgagactgggtctcactctgttgctcaggctggagtgcagtggtgcaatctccactcattgcaacctccaccacccaggctcaagcgatactcctgcctcagcctcctgagtagctgggactacaggcttgcaccaccatgccccactaattccccttctacttttgaggactcaaaaatcaaggcaatcaccttgggcttcccacctggcttccttctttgttcctgtgggtagggctgtggcttgggctttatacccacctagggctatgcggaacttgatgggtggagatggaggaagctcttagggcaaatacatcaacactggaaattcctctgcagcttttactacccctgtaacagttttttttttttttttttttccctgtcctggtacctttaacttctcttatgttgccgaatggaacacttatctccttcttcaggccccactttggggtttaggtggatatcttaaatgtcagagaagacagaaaaggagaggaaggatgatgaaagggcttcagtgaaattgtggggggcgggtggggggggctctgttctactcccctaggctgtttgggtaggactggatgctttctgcaattcttggagaggctgcgtatctaaaggcctgcaggaaaagaagaggtgaaaggagtggattttctgctcttgttatagagagcccaaaaggagggcaaccggctccctgccacgccctgcttggatttaggtaaaatgcagtattctgcttggagggcctgacttgactgagctgtcaggtcgtgtgtgtgtgtgtgtgtgtgtgtgtgtacactataaaaggaaagtcgcctggaataccaagaggcagtgagtaaggtgggaaatgcagtgggtgaagggaattagctgcggctggccactcggccactcagattccagatggaaggtcattgctaaaatgagtcagtgggtgagcagaagcaggccagccttaaaagggtgatgggtggggaatgaggatggaaccctcctccaaaccaggacttctggatggggatatcaggcagataaaacaaaaagcacaccttcacaccaggacttggatcactgacaaatccaagccaggagttctgaggtggatcatgtatgtaatgatgaggacagcatcattctttccagattttctccttttctccttcacccttctccctgatcctgcatatagccttgcaagattaaactgtccctaacatcatctccatgccacttgcatctgtcatctcttccctgtgtgtgtgtatgcacacacacatgctcactccaacacccacacaggctgcagcatcttccctcctcctacccacagacacataggttttcacaccctttagctcttctctctgcatgtcacatgggatttcccttccaagttcaagaactgctgtggtttcagccactgtaaacgggcactcccagcttctagctggcattttgaccctacaactttcacttttttttttctctacctgccaccttgagccttattctctgttacatttctgccctctagagcctacttattccagattctctttaggtgagatcccttctgggtcaatttggaaactgactctctcctgatgacatggaaggtgtgagccctggacagaggcaaagttgagacaagctcttttctcaagcaaaaaggtggtgtcttggatatattccaaggcctcactcagaagcccctcttccctcctgatatagatgctgtaataatgaggaggaagatgctactattagtgatgataatggccatgatcaagttgctggagtgtggcaagatcactgggcagtgggaatgccctgggacacgagctccctgatagaactcagaacttcactacatgagtgtgtagggggcatagtgatggcaggcagttttgtcatttttttcctttgcgttgttttatggctatgatttcattcaagaaaagatttcattttgttgtgtttgagaggccacaaacatccagccaattggagcaggtgatgaagggagtgaaagtataccaagggggttatttcaacccaatctagaattcccattaaaactgtgtgtgcttggggatgggagggacgttgttaacatctccctgttgaattgcactgaaatctaggccagccctggtttccatatgtgtgggatgtgcttagtcatgcttgcacatgaaaacatatacgtgcatatgtgcatgttaatttatctctgtgtttgttgattccaagaaagtctgtttaaaagacaaatgaaattatgcataagcagcaaataaccatcagtctcttaaataagcaaatcatttcccaatattttttctttgctcttaagtaggacacttatcaacatctggaatttggagtttgttttaatggtgattgttgctttgatatgctttaggtttgtaatgattgctattgatcattttctttggtgaaacctgtttttttaaaaaatgcttttcttgttttctgattatggctattcagtcttccctgtctctgacaaggcaaatctttcttttaaaagctataggtgtgtacctagccattctgccagtctttccccctggacagaactgaatttttatttttcaaagtaattaaaaaaaagttcatcttaattgagctcatgcccatgctaatacttcagctgcactgtctcttagactcatttgaaaatggaaatcacatagagcctcacagtttaaatcacctgtctacagcaggaaaaaaacacccaaaaccccacaaaacaacgaaccatcttgggtaaagtcaagcggtggaaattcagtgttctgagaattattatatcttaaacacaaatacaagacataattttatgaagatggtcacaaatcagcaaaacatattcatatccccgtccttcctctttcacacagctaaaccccaaatcaaggggctttaggcatttcctattcaggtatagttgaaatagaagattgtgcatgtggtggtgagtatattttaaaatgatacactctctggagctaaatccacagaagattctattgctctgtccccacacttctggatgtagtgtggaagtatgaggggctgaaatccctgcagctgtggctcctgggctgagagtcccccaggctgccggtaaagtagattttcctccatgtagctgagaaaatctcaaagcagagtggttacccaggcacagatctgttctgactggataacaagagggactatgatgtggacttggccgtttagattaaaatgcatcgtaggctctgggaacaagcacacatcagtagtaaaggctgtttaaacctttggggacagccttatgtttagattacgttaattcataaatattatactaaataccacttaaattggacttaaatgacttcaaagataatgcattataatatggctatccagagagcactagtctttatatctcccagtaactcagtctttgctgcctcccatccagctagacaggaccaaagttatgaatggattgctgatttcttcatgtgtgatccactgtttatgtgagtgttaacaagcatgggtatgtgtacatatatgtgtcttcagacactgcctctttttgttctacaggaaatgaaaagaagaaaagagaaacaaattaaaaatgagagaaaggaagaattggactactgggtgacctgttcccttctccagggtagaaaaattctacaaaaaggggtaaaattggccctcagctcatttctgctgctacccgaggaattcatctcttttctctttaatcaatagtacaatgtctttctctttggagcctggaaaaacaatctttcccaaagtgctctaataggggagaaaagaagactctgagttggtcaggagagtttgcactaaactcggttttcttccttgggtgttgtttctttgaattttaattctgggcttttttcttcctttctctctctgcctagcacccagatacccctctccccaattgctttctggcctccagggggtaaatttacctttacagtaatcaccccagtccacaactgctctttgctgcctccccagcccaacagcctttctctgatatggctgggtttgctccacaacacccacccactccctcctccacagactcccaatttgactggagtaattgccttttaaggtgcactctacgcatggcaggtattccattaacccttagaactccttccttctttagatatctgaaatggcaggtggccaacaaatggagacccacctgaaacctcctgtgtttaatttagtttttacttcttttccttttcctttttttttttttgccactaacataaacatgacatccaaactggaggccagtgtcctgtgtctctcaatttgatcctgtatgattcattagaagttagaaattaaggaaggggagagcaagaggcacaaatatgccctgaaaccaggcttaacaaaggcatgattctatccctaaccttatgttgtcaatttagagatggggaaatctagaaaccaaatgcaacactcattcctcaagcctcatcatgctttctgacttaacagtaattaatcaccaatggcaagcgagtaattttttaaggtggccggaggcttattttatcaggattagctaataaatcaggctccatcaccgaagaaggagtttaaactcttctaggactgaataaaccagacctcggaaacggtctcatttattcagctctctgagagcttgcaagcactgttagggacattgtggtccaacctcgattataaaaatcagaaggatggagaggtaggaagtttcactgggaaaaatatatgctcaggctctgaagggtgagctgcgacaacgaggaacccagtatgccggagctagtgggcctgcttgccactgactgagacagtttaggggagaaattatttagaaaatgaagttttgtttgtcctaggaattctggccagattttatatatcgatatctatatctatatataaaatatatgtaatatatgtattacgtatatattatatatataatcataaccttctctacctccctaatgcaaatgatgaaaattctacttctttgctattatatgagagagtccaaattacatcagcaacaaagtgatgatatcagggattgtagaaaagaaaccaaggaatattgttaaagtttatcttcatttgaaatgaagaagcaaataaagtgctttaatccagatgccatatgaagcccagctcctcataactgtcttttgcctctagtgagttctgatttttttaactttaaaatcttaaatcaccataaaaactgatcattaagatgagcagaagacttccctacctatgctttcaaaatttttattattactattttttacaatgaggacattcagaataacaaaggtttgatacaaaccttgattagcttctaggaagcttgattggaaggggaaaaactacaaagatatggttgacttgagagggagggggggaaaaagaaagtgttttctttttttcttcgaatattattttgaaggctgcctccccgttccacctttccaatctctcttttgaacagacagacattttctccatattggataaaggttgccttctctctccattacagcccccaccctcaccccaccccaacaaacccagtatatttccattctgctgtgtttttgtgttactcaacatgccattaactttaagatttactcctcagcaggcaagctggaagatactaaagccaataaaaactgctctctgggactccaactatgaagagtttggagctctgtttagtattcgaacgaagggagggctggagaaagagggtggttgtgatagtgaaaatcgctgctgcttagagagccagacagctctgcgctctgcacctaatgtgctggaggatcagctgtgtccatagcccatttgtggccaaggatgaggctgctctctatgtgggggtgggtgtgcgtgtgttttcatctttaaaaccaccagctgtaacagcatcttcggcggctctccacactactgtttattaaaaacggaacatccatacacatcccctacaacttccttagccccgtgctccttccctgcctggcgatcaatctctctcagaaagcatttaacttgcccacatagatccagcaccgattcattcccgctgcacatcctatatattactgttaggaagcggagcactgggctaatttcgtcacccaccagccacccacacacattctacaactgaacacgtttggggctctgctttaaagataataaaacaaggagaaaacaggcaggctgcggacaattcccatgaccactttcctaaaaagttgctgtgttttaattctttgattattctgtctccccctcccccaagcactcactggcaatgatcgcttcaagggagaaataatgtactataaagctctctgcatggtgagtttgggataaattagggtacacctttcaaaatgcaaatctcgcacacacatatttttttcccaaagccccgctttcctgggaaggggactatccaggcttgccagaccccccactccacccaggggatggctggttccttgctaattcttgccttaggttttatcactggttccttcaaacatccaacccccccacccccaacacacaccaccattcacaccacaatcagattattgaggcacacagctcgacagggagagtttactgttacatttaaataaaaatttctctttgaatttgtcacctctctcccttttagacggctgcgctcctgctactctagcccggagcaaaggatgaggagaccacctcctttagtattttcagcaccacggcgatggacagcaccctcggtcctcggccggccaggagcccgcgagtccgtccgctcagcgtcctgggctcgaccggtgcagccttccccatccccatctttcaggtcgctgtacccaaaaatccaagccccgtctcctcgatcccctctctctttctcttcatcggcgcccgctgctctctccatggcatcgttcctatcagcacctcgcccaaaacccagtcttgccccagcgaacagctccccacgcaccccagctctggtctccgctgcccgagcgcctccctccaccgcgcccgcccgaggcttcctctcgcttagtccgccgctcgtcagtcgccggccggccggtcggcccgccagcccgctcctgctccccggcaaagttgggagggaaaggtgtactcacctttgtgcatgcctgtgaacctgtccttcagaaccgtaagctcgtagattttgccaaactcctcgaagaggggcttgaggtccttctcatccaggttgcgggggatctgcccaatgaacagcttgatggcatcgtggtccttcatgggaatggtcgacgggttccccgggctgtggcttaatccgttcatgtgcccggcactgcccgggctgctgccgagcccgttggtactgaggcttgcgttgtcagcctgtccgtttgctaacgtggccatctttatatacatagagaaaatcttctttccttttattctttctcgctcacactctctcgctcctctctctcgctcgctcgcgctcacacacgcacacgcatacacacactcgggttctctccccctcggtttctctacacctcgctctccgctcgctctctgctctctctctttctcctcttctctcgctcgctcgcgctcgcgctctctctctgctctcccccctctctctctccctccctccctctcctctctctctccctctctctctccctctctctctccctctctcctctctctctcggtctgatctgattttttttttctttttttcttttttttttttttttttttttttttacattgaacagacaggatctctgtcctttccgtttaaacaggctggaccggttcaagttcccagccagaccaggggtgggggtggcgagtgtgcgcgcgcggaggagggcgcggggggccgggaatgggcgcgctgtgggggcccgcgccacggcgggcggcggccgggggcagggcggcgtggggcggcggccaccgcgcctcccccgtcggcggccccgcgccgtggcgatggtacagtccgagacggcccccggctataaatagcgccaggcgcatggctcttcgggaggcgctgagattccgggcccggcggccgcggggagcgggtgtccgtgaggagccgggcagccggcctcctctctttgccttttgggggttctttttgtaatagcagcaggtgcaactttttgtattttaaaaatagtgatttttattttcgtgtgggtatgtaggggggctttatccaccaagctatgctctattagggcgccaggcgggcgaagcaaaggcagggatggcgggcggggcggcggcggaggtggaatgggcgcttttttcttccatctggctttatttatttatttagactagaaaagcgagccggcttggagggagtccgcccggggatccgagcgcgcattcatcagtgtcgagagaaaaaaagctacataaatatatattatgtggataaatctatagacaagagctctctcgcgcgcgctctctccctgtctctctgtgtgtgtctttctctgtttttttttcctcctcgcacccccaacctgccagagcagccccacatcttcctcccgcccggcatctaccgccacccaagccacctgccaggatggggctgggagctgtcgggccgcgccggggggcagagggacggggagtagagactcggggtccgacccccgccccaacccgcttccgaaggcggaaggtgggggtccccgtcccgggcggcctcccccgccccggagagcgcggctggtcccccggtggctggcgggaggaaggtaggagtcgggcgcccctgcccgctcgcccgccggagggggaggaaggcgctgggcgcggtggccggtgagccagcgcgggggatggcttgatttgccctcgtctgctttacgggttcaaatagaatatatttttttaatcaccatcaaaagaataaagcccctgaatcgctatctgggttgccgccggaccgagactcgcgcggcgtgcgctgcccccgcgggtttcgttttcggcacctacagctcccgaggtgcgaggctgagtcgttcctgccgtggggaccgggggtcgagccgcccggtccggaccccgccggactccccgccaggcccactggggctggcatctcggctgcgcgggaaagggagtggcaggcgcggagccgggagcagggtccgagcggccccgcctgtaggggtgaatactggtggtgaacttggctggggtagcagattttcacgttaatgatatttacctgcaccccgtcctctctcatgtttgctttttcagggcagcctc

SEQ ID NO: 102 - DNA, 179336 bp, Homo sapiens
  source 1..179336: mol_type = genomic DNA
aaactgtagagatggagtcctgctgtgttgcccagtctggtctggaactcccgcctcagccagccactgttgggattacagacatggaccactgcctgaccctcctgggggtcttaacaagccttgcctccaggctgaggagcccaaggcgaggctgaagctgtgactgaagcagctgcggtcacccctgtcacctgggccgggggagtcgacgccctgtggcttggccggtgtttgtgctgtcatctgttcaggcaggatcacagaggggctcgttcagccctcacccgtcacggtctgctgcggatgctctgcggagcacttcgtggtcctcacatggacatcctggcctggctgatggacaggcctgctccgggctacctggactgctttctctctctcagatgcttctagtattttcctgctaatcatggctttggggttgaggtagaaatattctatcatgttagccactgagcattctaggatgtaaacgttagcaggtgaactgaggagaaagcaacaacttgaaaaatgacctcaggcacatgggtggtttttcctctctcagatttgacccgggggtggccctaatctgtggtcctgtgcagccagcaccagggcaacaactccagagaggcctgggaaacgggggcactgtggactagagagggttggggttcccatttttctctctttgctgtcactacttttccttaagggtgagccctgtttccttaagggtggaagcgtgagacagtgcaggtggctagagctctgggagaaacccatctttctggacagagaaaccaagaaaagggaccccagaagtgagaaaatgcaaggcaaattccagcaaggagagtgctggagaagcagacccccagattctctacatgtgctgacacacgtccctgcccaccccacctgtgagtgcaggcaacgacccaaaacagcacagccaaggccaagggctgacctggtggtggacctgctgctcgtggaaagagagacagaaccagtggtcagaacctaaaccaggttgcctgctgctgaaacaaacacatgaaatgacacttacaacgagggtgttaacaacccagagtctaacctaacattccacatgacgagtgaggattcaacttgcagttactcagcacacaaccaggaaaatgcaaacagaaaagacgatttcagccccaagatgctcaaacgttcaaattatcccagaattcactgcagtcctagttataaccatgcttcatgaagtaaaggtgaacactcttggaatgagtggaaaaccagaagtacccagcagagaaataaaaaggaacctaatggaaattttaaaacttaattacagtatttgaaataaattcactgggtgagttcagtagcagaattaagacgacagaggaaaaaaaatcagtgaacttgaagacggagcaccagaaatagccaaatctgaaggacagacagaaaaaagaatgaagaaaggtgaacagagcctcagggaccagtgggaaaacatcaagaggtctaacgtctgagtcactggagtcacagaaggagaggagaaagatcagtgcaagaaaagaaaactgaagaaataatggcaaaaaaaaaaagtcctcaaatttggtgaaagacaaaaactgcccatctaggctgtggcaggcctactagggaatggacaaaaagttccggcacgttccactggctgagggagcatgggacacggacagctcagctgcacgtccgtaaaccgtcccttccacggccaccctgggcatggggaggggcgggggtgtttgtggagaaaaaccagcaccgcagaagtacaaattcaaaaatcttaatttattgtagactcttctcatttgtaattccagtgttttgaacattaataaatacacgttctgttaaaaacctccagtgtctaatctctcccataaagtcttaagtaataaaaataggtttacatttttcccatctcaataaaactgacagttgttttttggtaacagttctgatcaaattaaaaattacacctcgtgatgttggctgtggagtacgtggaaaaaaatagaacaaaaaaattacacctcagggggcagaatcctgttaaagtcatgaaaggagactgttcgaagacttaaaaaccttttcgtacttaggaaacgccaggggcaaacgtttaaagggactagagttttttatcttcgaaagaccactcacctggtaaggcacatgtataattcattcaggtgtgaggactctgggatctcatttcatcctcctgtcctggaccattttcagatacgcttttcctctcccataggcatctgctaacagtgctcacattttcatcagggtcaagtttaaaacagtgtggacatctttgcattttacttgattttcatcctattttatggtttctcctatttggaagcagctgtgctgatcacttatttgggcacctgatttgaagaacaaaggaaacgctaaaatcaaacatgtctgacagttccgggacccgttccacagcccctcgggccacgctgtgccagctgcctgcagtgggcccgaccttggtgtgaatttccaaaaacagtttggtaaccgttgaagagtgtggctgtggctttgtccctctgcacaattggccatttgaagcaaaatgaagtaattggtcagactccagaggggagaaccctgcctggagatcctcgcagtctcagagagttagagaattggcaggaggtatgtaacggcctggaaggccccacacctctgtccaaatcaggaacctgcaacgctttaaggtcccaggtcccacggggagcaggagcaaaggacaaagccatccccacctgcagctcccgggccacctgggaggcggtgaggggagggggtggtggtcacagaatgaccaggtgaaaaatgacagccgtgtggcaaccgtgccccacagtgacctcagcagggctcctcacacctgcctagtgctgcactgccctgtcttgaattcacacagccggggcagatggcagcagaggacaaacgcacacacagcgaacactggggacccagggggccggcggggagggcccacaccatcctcacttcctggccgaaggcagctgtagggcttctagccgcttggttttagccccactgctgacgtatttcccacctttgatctgctggggcaccagtttcgtcaacacatgccagattcaagtacaactgtgcaatcttgacagagaagacagcaagagatcattgcatggatctctcgggataacaaagtcagcacgaatgcaatatatatacaggttgcacctcctcagagtcccatacaaatatataaaagtatctccacctttcccacatagcgaagtgattttaagacaaggggtgcctttgcaaaggactgcccgggctgccagccacgggtccgcactgccatgagatgcccgcctgggcggggctggaccgcggtctttggtctgtgcccggcgttcctgaactctggccagcctctgggcccagtctggggtcccctctcagttctggctttgactgcagtcttaggactcagcggtgctggcccagtggtccacgcctccctcatgcctgtggcctttggcacttgtcaccaggtctgacaggccctgagctcctgggagaaccaagacctttgtgtctggatgatcagtcggggggctgccaccatggggaccgccacactctgggcccactccacttcaagggcagtggccccttgggctccaaggtctgagggtgatgccgcagcctgtgtggggtgacgggcttgcctcacggtttcctgatggttcaaattgaagtttcattactgatggttcaaattgaagtttcattactgcctctgcgcgtgggaagaagccagcaagcaggtgaagggtcagtgagggtagcggcttggtggggcccaaggttgtcacacgggggggcaggatcaccccatcagggtagagggggcgtctgggggctccagggagggcaagctcatgttggatgaggctgcccttgggaggcaggagaggggaccaggaccagcctgtgggcctctgtgttgctggtctttcagaagagcgcaaggaatccacgttagaaaccggccatctctacagtgacttttggaaggggcattctgaagacctggcttctcccttgtgagtttggagggagggaggggcgacagggagaggtctggggccaggaccccagctccaccccgcccccttcacccctggcattccgggaccctcagtatcctcaactgcaaggtgggtggcagtggtcccaggcggagacaatgctgatcaaacgcagagcccagcaccttaggtcctagcattttggggctggccagggcttcagagtcccagaggcctgagacgtgtccccaggatagggggtctgcccatctccggggtatcctcctgacctcagctgcagcgcctcccccctcccccatccccgcctgggcttcctctgcactcagggctccaggtgaggtgggtgtcaggtccctgaccactgccccctctctctcctgactcaggacaagggggaagtgggtgatccccgccctggaggcccaggctactcactcagagtcggagccatcggcctgggcgctcccagtgcgcacattcatggccaccccgttgaggtggtcacgccccggctccctcccagggctcttgactgtgatggcgcagtcggggccgccagagcccagggaagacgtgcgcgaggatgtggggctctgctcacagtcggccagcttctcccggagccggcccttcagcgtctgctccgtcagcgtcagcggcggcgggtaggtgactttatttttcaagatgcctgggaggaggagacacggcaaggtcaagtccgggtgatgctgccgggggcagctgctgggccgtgtgcagctgagccagcctcagcccctgtccttcctcctggttccccgggtcccagggctaggccaggaggccacgtctgttctgcccaggccctgacttgccccaccagccccagccccactcccacctccagaccagggactggcccttctgggtcctccagcctttcactgcagccccggcctccccaggcacctttcctctgctctgggggctggctgctagcaagcctggctgcgcccccgctctcctggtccggggggtactctccacggtgactgccctgctcctcgcggtgcagctccacgctgaccttggtctccaccttcaggcggggcttgccgctggggtcctcactgtcactctcagccaggctctggtcgggccagccggccggaacgtggttggccacagcgtcccctgaggcacgagagcggtgctcagcaggcagcggcactgccactcgagctgctcccttgagagccatgggtctggtggctctgacccacctctccccaacctgcaggcctggtagggctgaaccctaaaggtggggaaactgaggcccaggagggcgagtcctggcagcagggcccttgttgggagcccccgccgcatctgtaccagtaactatacaggctaatcccccactggcagcctcacctggaccttgcggtgacagtccacagagacccccctgagagttcctgcctccgctcagggggttggcctggaggagccctccagaggctgtgggggagcccaaccagagtccccccaccccaggctgtcctttcatgtggctgcagtgctgctgggcatatcctgggaggaagggacccagccatagccaaggcctgccccgagcccgctgtccacagcccagcctggcccaatgtgccccacacactcacctttgggggtgctgtggacggcgcccctggccgggtcccatttttcctcagctcccaccccatcgtcctcgctgtctgacgagtgtgaggaggcgtaagagctgctctgctcatccagggacagctcgctatctgagtcggaatcgtggcctgtggatgcgcgggggacagggaggctcaggccctgggaggtgagggagtcccaccgagggccaagcagagccactgggcccctggcatgctgacgctgagcatggcgaggctgctagtgcttcttcaggggcagtctgtccagtgaccgaagggacgtgggaaaaacaacccacggggtcctccccctccagggaagccataccagggggatccttgcagctcctgggcatgagggacgcgtctggctctccgtggctgcccctcaccagcccagaggacacgccgagcttctggatcccttcatccctagagaggccagggagggtgggctcagtatcatccgtcagggaacaggaggtgctggaaagttctctggaagattctctgcccctaccccttctgtgttcccaacaacagcacagacaaaacagcctcccgagtatgtgggggaaaggtggtggggggaaaggttgggtggggggaaggtggtgggtggaaaggttgggtgggggaaggtggtggggggaaaggttgggtgggggaaggtggtggggggaaaggctgggtgggggaaaggtggtggggggaaaggctgggggggaaggtggtggggggaaaggttggggggaaggtgctgggggaaaggttggggggaaaggttgtcaggggaaaggtggagggggaaggtggaggggggaaggctgcggggggaaggtgcagtgcggggaaggtgcgggggggaaggttgcacgggaaaaggttggttgggggaagttggtgggggaaaggttgttgggggaaggtgcaggggaagggaaggtgcgaggcggggagggaaggtgcggggcagggagggaagttgcgggtgggaagaaggtgcgggtggaaagttgggggtggaaggtgatgttggttgaatggcaggacacaggttggggtggcaggggcaaaacctgagggagttcgagagccacctccccgaacccggagctgcggcctgacctgacgatgctgtccagcgaggcggtggactcgcccaagtctgtgcgcagcatgtcaggcccgtcaccgaaggtggtgttgcagttgagggagcgctgaagggaggggaggggctggtcactgccaagtggtggccaccacatgaccaccacggggaatgactctgtccccacggcaagccccccacacccacaccctggctgggcccctgcctggcacacaggaggagctggccccaagcagtcaaccctcactgcaaacgagagcctcctggcagctgagggaagcacatcctggcccgcgctgtggtcaggggctgccgccctccctacggccactgcttctggtcaggatcctcggtggtcctgaccctctctttctaaggcctggaagagcagggttaggatgcgacccaggccccatctggccgattctgtcactttctggttctgacgcggcagccacaccgtgcaccgcgggcggctctgccatccccaccgtgaggggcatacgggccgcaggactggggctgaggctcgatcaccctcccccgcccctcgagatgccgcccagcccccagtcccgcggtgtccccggcgcctcctaccgtcagcagggtggccctggtggtggcggagtcctccaggtgcagcttcctcccgccgagcacgcccttcaggtgcttccggacctcctggttgagcacgcagtggaaaaggaggacgaaggggccctggagggaggaaggtggggtcagcacctgctgctgcctccctaggcacctgcccttaggcgccccagcacagatgcgcatacagccttgagtgcacacaacatgtccggccacacggcccaggacacggccaggcctcccctcctcagggactgctgctatctggaggccaggtgggggagctcagaaactgagatgcctgggccagacccccggtgtgctggaggcagtgagggccccggctcaggccagtcttctgggcactccttccacagtccttggggcccctctggggtccccactgtgtcgtaagtccacttgctgtgtggcccttggtatgactagaaatggccacttctgttccctggagacacaagtggacttgtgctggcctggcactagggtcatcgtccccagacacagtggggaggaggcaccagcccccgtgccggctgcacaagggactgagtcctcacagccacaggaggcccccacgcgggacccaggcagggctggtttgggaccgcagaggcctccactgcttcgcatcacagcgatggtgtcacggcggccaggcaggggtcccgcgggcaactcggccgtcacctacctgtaagccgctgaagatggcgaagaggtagtgaaagctcagtgcatcgcggttcacagccagcagccccagcagccaggtggcgctgatgagcagcagcaggaggaatgcggtcctcagcagggagctgcgggagggcaggatcaggcctgtgcccatcgccaccacctgctcccttcctccctccctctctgcacgtccacctgtccacctgcctgcccgtccgcccatctatctgtccgtccacctgtccacccagccatcatccaccttgctcccttcctcccctcgtagccaggtacggactcatccgggaaccagacagagctcgtgttagtgggggtggtggtggaatacattaggaagcaaatgagaaaacaggagctgtgaggactacaccaggccaaggggcctgagccatgcccatggctgcactagctcccgtgagataccctgtggagaggcaagaggaagagcccaggacctgcccttgagctgtgaccctgcaatcagcttcctgagctctgcctcagtctccccatgtgtacaaggggaagacaaaggcgcatcccctcccagggttcagaggggatggagtgaatccgggtgacagagcccgcaaggtccacaggtcgtggatggcactgaagacgaggaactgacaaggccccagaccccccgtgcacccccatatccggccttccaggccactcactgcctctccctctctgccctaccccccttcagactcggctctctcctcccgggccgggagcctcacactcctcctgacacccagcccctgcgcaagcattatcccttcgcccatccctggctcagtcccatctcagctaccaggtcaccaggggctggccttgttgtctgacagatgcccccgtcaacccctcctgaccctgtcgtggctcctggacgctgtgctgagtcctcccgcggtgccacctgctcctttggggcctcgaaggtcccctctcctccctagaacactggaggttccctctgtgctgggcccctgttccactgcaccctctgacagtggggtgggggggtctcctcccctccagtggcctcagcaacaccctcaccacccaccagaaagtttcatctcccccaccccacccatctccactctggggattccagacagcccaatacttctgtgccaggcgggagggactgaggcccaggactggctgccagccccctcccttcagctaacctcctccagccccctcccctcagctaacctcccccagcccctgcaggtgcaacgtggcaaacctctctggagccctggggctcacccaggctgcccccagccctcctccatgaggcctacacgctctcatggggccccaccccgcagagactggacgtcggggtctcagggcccagccgacatggctggccggtcaggttcagccccacttacacgatcccttttttcccataataatggtgctttctttggcaggaaacctttgcagataggacagaagtgactgtgttgatctgaaaacaaaacaagccgatcaatgtcttctctctcgtcactgcagacctccaactgccaaaagcgcctgaggcccttcgccctgtcagggaggggtggctgggtgaggaggacccgaaccctggcctgtggggcgaagcacacctgtccacccactgccccacagcgcccaccacacccagcctgcctgtgcgggaccctcctgggtgctggacgcagatggtctcatgcggacacgacgcgagacctgaatccacgatcagagggtgaggtccgggagggccctggcggctttgctgactgttacaaggtggcccttcctgccccccgtcggctgctcagaggagttggtggccccagccaacccagaacagcccttccagctcatgcatgtttggggcacccggactcccgtgaaggccccacactcacgattataacagctccgatgggccccgcaaagctccaaatcagggtgtcttgaagcgacagccagcagaagtcggggttcccgtagccctgggggtccaggccgaccgccagtcctgaacacagcggggaggaagggaagggtgagggccacgtgcccagtggccaccccatgccaaggaccagccagggtggggtgaaatgggggactcagcatctcccttctcagaggaaggagcaaggagtccagggagccagcccagggcccctccaagcacagtctctccgtgtagggtctcaggctcactggcccaggtggcaggagctgctcctggattggccccatgaggcagggggcgtatctgggccgggggctgctgaggaagaccagagaccctggagggtggcagtgagatggtgcaggagggatcgtgaaggcagacggtgcttgggaggaccctgccagctgggccatgtagaggtcaggaggccatgatggacccaaggtgcaagggatgaggctccaaaacagatggaggacggcgtcacctacagggccatatgtgagcgggtgaggaacgcatatacccccataccacatccaaccacgtgcacatgccatacacatgtacataccctatacacatgcatgcagacacacataccgtgtgcagacacgcatcacagatatacacacacaccacagaggcacacaccatacacacgtgcacaccacacacacacccccgaaactgcctcaccaccgagcctgctatacgagctgcttgtttagatagaggaagaaatgctctgaagcacagttgtcactcccagccacagtgtgacaaaccagatccgcctgtccatgcagagcatcaaggtgacacttgggacaggagcaaccagcaggtgagacctggtctttctgtgccccttgccccaccctggcctaggctatgctcctccccactctccttatttaaatattgaagagatcccagctccctcctgtttaacaccctccagcacttcccactgccctctggaggagccagttaaccaggaccactgaggacagtcagggaagccctggatggccgggggaggcagcagccagtgaccagtgcctgcagctcagtctgaggctccccgggagttattttaagatcttgtacaagacagacctaagtgttaaacaaaacaaaccgaaacctgtttttaaagcaagtaggaaacgtgaactatctggatttagagtccaaagggcagaggcatcgcagagacctgctccgcctggacatcgaggtggcttttcgacaaagccatacgagcccctttctaggccatgttcttcatctcagcgtctctcacagtaagcacctaatctaggcaaggtatcgcctccctgtcacatcaggaagtggcggctgccaccccgcccaacctgcccccacctcagtggccctgggtggaggtgaaaaaggttcttcagggtcccttagagtaagggagatgagtcacatcagaacaccctagccaggagcctgcctggttggaggctggtcagtgacgttgctgtggagaccaggacggtccagcaagtgaccatggcactggccccaggtggctgctgggtgctgccctgggagcaacacccccccaccccagtgcctctggcctcagactgcgtctaatccccagaacccagggattacccaggaaaaggggttcttctttttgtgaataaaggtagatttttctcagtagggagcaaaccaactttctgattttaagcaaaatgtgtgctgaggaagtactgtttgttctactcactgattcactaattcattcatccactcactcatcccatccacccactgcacccacccatccatttactcatttcattgtcatccattagctaccaatccatccacccacccatttcatccatccatccacccactcatctctccatccctccaaccatcctattcatatccactgacttatcccatccatccatctacccacccatccatccactcactcacctctccatccgtccatccacctattcatccactcacatatcccatccatccacccacccatccatccactcactcatctctccatccctccatccatccacctattcatccactcacttatccaatccatccatccatccatccatccacccacctctccatccctccatccacccacccacccatctgctcactcactcagcccttcatccctcccatccatccactcaactcactcctccatccatccagctacccactcatccatctattcacccatctactcactcgtctctccatccctatatccatctacccacccatccactaatcccatccctccatccacctacccatccatctgctcactcactcattcctccatccacccattcacccccatccatccatcatctacccactcactcacccctcacccatccatctactcactcacccctccaaccatccatctactcacccatccatgcatccactcactcacccctccacccatccatccatcctcactcaacccccatccatccatccactcgctccccacccatccatccatccactcactcaccccatctatccatccactcgctccccacccatccatccatccactcactcaccccatctacccatccactcactcacccctccacccatccatccactcattcacccccatccatccatccactcaccccccatccatccagccactcgcttaccccccatccatccatccactcaccccccacccacccattcatcctctcactcacccctccatccatccacctgcacactcatgcactcactcgctcttccctccatccctcccatgtgtagacgtggaacttttgtctgttaagtgctgcagaaataaccctgaacagacctggacccagctctcaatgagctcacacctcacagaagacgtcgccccaggtgtctgcgagtgcccctgtgcatgcactcgcagtgtgcagggccgaggcctcctctgctgggggctggacaagcattggggctgggcagggaagagaaaggagggcagcgttcctgcacagctggggtctgttggaaatctgtggttttatgcagggccactctgtgcatcctcacctgtgacaatggccgggatgccccagcccacgacgtagtagaaccgcatgggccccgtgtcgatgttgcgcacctcggtcagcatgcggtagacatgcaggctctccacgagggtccaggcaaaggtgctcatgtagatgtagtggaggaggatggcaaccactgtgcacagaaactgcgcagggaggggccgctcagcaagggcccctgcatcccaggctgaggtcagacaggcatgagtgaggggtgggggatgggagagctcacaattcggaccaccctatgtgtctgtcctcagctgagcagggctacatgtctggccaatggctgagagccaggaattgaaaatcaacatccacggagcagctgagccagcaggtgagccagccctgcctgcctggacacagaaagcagtgtgagaatgacagagagagactagtctctgaggccatgaacacaaacccagtcccacatgccccggaactgcacttgaagatgtggccccaaggcagcttcacacccagtgctctgggcggggcgggggggcagcttcacacccagtgctcggggttgggggggcagcttcacacccagtgctctggggtggggggggcagcttcacgcccagcgctctgggaggggcagcttcgtgcccagtgctctgggagaggctgccccagccagtgctcccaaagctgccgccagctgggagaggatggcaggctcccctctgggtcccgggaggctgaaccagccaaatgggagaatggggagatgggggagaagggggagatgggggagatgggggagaagggggagatgggggagatgggggagatgggagcaatgggagcaataggagcaatgggagggtcccaccaccctgaccccacccccaaccggcctgctctggacacactgtctaatcctcagcagccatcccatcagtccaccctaccagggggtcccagggagataccctttaacagacacagaagcgtaggaggagaacgagggcccccgcctcaaccccaggcttaaggccactttgctcaggcactgggtcacggcaccctaagggtgcccctgctgacacatcagcctcgaagggccagccaccctccagaaacaacgcccccgaggtggggagggccccaagtcagcatcgcatctgtcagatacggaacagagcaggaaccgaagcagggaacgcaggctcaagttatgccagagacaggccctttgcctcagactgtggcctcggtcaggaaaggaggcgcgagcgtgtggctggagaactctacaccaaacaccctggtttcctgagtggaaatcacactggctcaggaaaaggaagggggtgagaaggttggttggctggatggctgcttcaagtaatgcgaaaagtaaacccacgaaaccaccttttgaaaacaaagtgcgagggctgtgccatcctggctgcagcagggtcgtacctgcttccctaaccaatgtaccaccttttccagaaatagaacaaagacaaaagcggatgcataataaatcatttcagcctgccagcgctctgagagatgaaaaacctcgcccagagataggattgtgggtttacaaaaaaaccataaagcccaggcactctgccaagcccctagaacgctgccgggtcgccctttccttctccatgctcagccgtgcgtggctgccgggacagcgctcactccggcaggcgacgagtcagtgtgggaacccaggggccgcctcagtttcgctggggtgttgagttgcagggagtggcctgcaccgactcccctctcccccattcacgccactcaaaagcacactagaggggttttgagatgaaatccgcacacttctcagagccttcccagaccaatgcgcggatgagaacgtgcccattgcggggatgcgcccggctgcggatgtgaagaaacccctccgcaggagcagcgaccctgccatatgggccccgcacacggagcccccgccagcccggggcctcggcctcgggaagcacctgggaggcggcggggaaggttggccctggctggtctgacacacgcctcggggctcgtccttcatgggccaggcctggtgctccacctaccactgctgggaagccatggaggcttctcaagggtgacctgcgaggtgggggtgcctgccttccctcttgaggtaagaggggtctggtcccaccgcttgccgtaaaaaaggaggagcagctcaggtctgcacgtggccctgagcagctcgccggaaggttccagcctggtctttttattccgtttcccttcccagggccggtccagccccacagacaccgtctccacccacgagttggaggcggcctccctggctcatgcgccacaccttccttggcctctgcaggtgtcccatctcacccagaccctgcctctcaatgggtggtaccttcaactactcattctcccttctggagacgtcaaactcccctgactcctccttcctgcctgctccataaccggttggtcctgtccctcctttctccccgtgcccagtgccctggcttcagttctgggtctccaccccacctcccaggcctgcgcattatcagactgctctgatcttctgcccgtcgtccacctgctgccaggctcttttttttttttttttttttttgagacagggtctcactctattgtccaggccagagtgcagtggcaccatctcagctcactgcaacctctgcctcccgggttcaagcgattctcatgtttcagcctcccaagtagctgggattacaggtgcgtaccactatgcccagctaatctttgtatttttagtaaagacagggtttcaccatgttggccaggttggcctcgaactccttgacctcaagtgatctgcctgcctcggcctcctaaagtgctgggattacaggcatgaaccaacgtgcccagcctaattgtttctcataacgtgcctgtagactattttagattttttctatgagatccttcatgttacctaataatgacagctttgtttcttcctttctgatctctatgcttttgttttccttattcattgcactggcaaggccaccctgcaccacagtggtgaacgtgagtgggttcctgatgttacaggggatgcctccagtatcttcccattgttatttattgcaactgcaggttttctgtagatgtcttcattagattaaagtttcccctagtcctagtctgttcaaaggtttttctttctttctaatcattaatgagcataacatttatcaaaattcttttgtacattcatttctgagaaaaataatatttttcccttaaatgtactggtgaggtaaatggcattcatagatttttaaaatgttaaaccatccttgcattcctaagataaacccaacctggccgtggtttttatactgcaatgcaaattctctaacggtgagaggactatttagtctttctacatcttaaatcattttgttttgttttgagacagtctcgctctattgcccaggctggagtgcagtggctccatctctgctcactgcaacctctgcctcccaggctcaagcaattctcctgcctcagcctcctgagtagctgggattacaggtgcccggcaccacgcccagctaatttttgtatttttagtagagattgggttttaccatgttggcaaggctggtcttcctgacctcaagtgatctgcctgcctcagcctcccaaagggatcctggtgggattacacgcatgagccactgcccttaaatcacttttgacaagagttgtattttcctggggatgtacacaagaatcacttgaacctgggaggtggaagttgcagtgagctgagattgtgccatctcactccagcctggattgacagagcgagactctcaaaaaaaaaaaaaaagaaagaaagaaagaaagggccccccatctcccaatagagtcaaagtgcttgggcctgccagtgaatcccacatctccacccacagcctgtgaccaggcacgttcctgaaagggcatctgtgaagcagaggtgggggtggtgaggaggagctagccagggtgcttggagtggccaggacaggactatggtagctgctccaagctgcggcccagacagtggggaggggagcagagtggccataccgggttttccgtctggttgatcccaatcacgaacaccagctgagagaggaagagcgccacggcgaggtgcttgtgaatgctgtgcaggttggagcgcagcatgcggaccaggctcaggaggacgaaggccaccagcagggctgccagtgacaaggacacagcggcataggtgacaatcttcagaggcaggacctccccgttctatgggcaggagggttaaaggcaggagagaaggtaagggccgaggctcagatctggtcattgcataacagagataaattacacacttgcttatgaaacgatcaaggctggcaggatcaggctgggctggggaggccgagtgctcatggctctgggcctggaactgcccctcctgaggctccttcaatgccctgggccctgggcatccctggggcctgcggcagcacgccaggctccctccactggcttgggggccgttcagagacctctggctttggggcgcccaggccatgggagcctcggactctcactccagcctcctttcttctgcctcaatttcagcttccttggcccacatgtcacctggcatcctggccatgagacaagccccaaccccgcccacatatgaacaaactccactaatcactgaccccgtctccaggctgggtcctgctggggagtgacatttgcccatgagacaggggcagaggcgggtcagcttcacctgcatattgcacaagaggccgctgccctcctccagccccgcctgagggctgactcacccttccaagaatgtgacagaaaccagggccacttcacatcaaaaagccctcggaaaggacagtggcctgggcccttgagccacagtgcaaccccggggaggggccgggggaggctacccaggcccctggttctgactcctagaccccagggtcccacacaggccatggccaggctggctcccacctccctcctgtctggataacgggaggccaggacagcgctcgggccattccccaattcatctgcagcccacaatggccggctcacattcccaggccgcttaaaatgccagaggttaaacattagccgcccagccttttgtcctgctgccctgcgtgtggccccgagggagagcgcccagcagctgtcacctcccttaggatcaaagcaggtggggagcggcaccgtccaacagacccgcactgaagtgaggggcaggttccgagagctcctcggagcctgagctttgggtctgccattccggggtttaatacataaccagggctctctgaaaacccttataatggggctttgttatggaaatcctcagactctggccaatcctcgaatatgtgttttaatcggttgatttgttttgttccaagcacttagaatggaagatttagtttgaggaggggacagatttgggggcaggctcagcaggtttgaggacgggcaggtttggcggggaggtgcaggtttgggggggaggggcaggtttggcggtaggcccagagggcacagtggccacgggaggatgcccacctcacgcctggagatatccatgagcaccgcaaagctggctgtgtggctgcactggcaggcgacatgtgtccggttcctggacaggagctcgcagccccgggcagaccaccctcccgtcccaccaacgctgcggagaggacagagaaggggcaggggtaagacggttccctctgcccatgagtctgtaaagggcagcctttgcccagccctgggggctcccaggccatcctggccaaaccaaacagcaggtgccgtgagtgctgaaagcccagcgccctcgcaggctgctccccaccgtgttcctcaccagccccctacaccgaagacaagagccacctggctgtaagaagagcagcctcactgccgcggaggcaggaccatgggaacagtctcccttcccttctgtgtctggtcagggcctccaaggagcaccctctgaagttcaagttctacgtgccatctagcagcaaaactcaaatggggctgtctcgcgtccgccccgctgctggaaccactgcccggggttcacacagctgcgatgcggtcccgtctccttctgagggcagacgctctcagaaaggacatctcaccttcctctgacactttcatcttcagattgcacaatgttttatgggaactgcccagaagccagggccccattatgactcccgttttactgatgggaagccccaaataacaaggtgttataaggtgtgtctcagcttcagacagggccctgccctcgcagactctgggaaaaatcacataacctctcagatccttactttgctaatctgtaaaatgggatgttagcattaatatgtttggcacaaactttacaatctgggaataataagtgcaacataaagcagagagcaggtcattagagctggagctaattgccaggacgcagatgaatgcccaagacagacagccgggcctgacgtccgtcgtggtggaatgggttcctttcttctctcttttataagccaagcgcctactacattccaggtgccatgctggttgcttattaactagaacttggaaagcacagaagcaggagaagaatgaggctgggctaaccgggctcgctcaccatagcgccacccccagcacagcccccactcacggctcctcactgtgcccagggcaactgtgatgggggcagcgttcctgctgcacagacgtccccagatgcacaacgctccgcagattcaagcctgactcctgcatggcgtctccccttcccggcactccctcccggtgtgtggggaggcagtgggtcttcccctccctgactgtgctcccatcccggcaacagggcccttcccaccacacccccgttccagtgccttcttctaaacagagacagcaaaagtgaaaaccaaccagcagagaaaaggcaagctccctgtaacgatagagcaactcaaatgtccacacctcacgtgaactctgcagctaaaaagcaaaaccaaagcacaaacactactggctcccagcagacgggagccacactgtggtgctgaatccagtctcacgtgtgggtgagaatcactcattttgcatttttctaacgacgaaacgcctttccctcgcttgcatggatgctagaacacagattctcgcgcacagattctcctgcgttcgccactctgtgactctctgacgctgcttctgaaacgggccagataaactgtgctgcggccaggtgtggcctcttgggggtgaagccagtccccacagctagactgtgtcagcctctcgggcaagaccgtcagcagatgggctcttaggccagtctctgggttctgtctcccgtgtgtgaccggaatgggcctgtcttatccggcggtgaactgggcactacactagtgttggccgctgcatgtcgggagtcccgcaggtgaggggtccccttcctgggtgtcagccttgagggatctctctgtgcgcctgcacatctgtatctccacgtgcaggtctgtgtgcatctgtgtgtggacatctaggggaggactctgatattcccacagaagcagagcaggaggctcactgcccccacgggggacttaaaggggaaacacagaccacaagagaccgtcctcttggggcgctctgccactgagcccccgaccctgcgggggcactctgccttggcaaagccctcacatggggctcctggcgtcacacttacgccagggagtggttccagaacacgcagacaggcttggttcgctcctccacctccagcagggcgaactccaccaggacgggcctctccaggggtctcgggagcggagccccctcgctgtacaccagcgtgctcaccatcggggtattaatgatgggccggtgaggcaacctgaggtcaagaagccagagcatggggacaaacacggtgaggaaacatctgcttaaatcccgcgcacaaatgccctgaggacacgccatgatgtgtttctaggggagacagaatcacactccgagagctcggacccacggaccccacagtatcttcatccctagagcaggttttatcactgacagggcacacagagagaggtgtcacctttgggtcaaattgggacttcagaaatttaaaaagaaagagaaggcacaggtgcaaagatgtcacagcccataatagctaatggcagaatcacaggggatggtttcagtgtccagcaaaagacaccaaaataatggcagctcatggggatgaatcacccagtcactgagaaccacgtgaacacgaggatcccagagccagggaagtatctgggaaatggcaggaagaaggagggcggagccttgggctgctcccaccgagcaggttgcaaagctgcttctgggacattcatcctttccagccaggactagctgagcagacctaaccccggggccagcagcaggcactacccatgacagccttgggccaggtgtgtggggacagaatggggtccctctgggcacaagatggggtgtatgctggggagggggcatttctggcacaaacaccaggatgagcccaggcaaagggtgtgcaatgttccagggtgtggtatcctgtggcagacccagaatctccctccaaggaccaccacaaggcaatggtctctgtctctgggccagggtcacggtgaaatgtcactgtgaagacctgtgcttgatcaggatcaggattttgacctgtggaagcctcaggagcctccagaacgggccctccccgtgtgccccgtgcccaggccttaccggaggctgcgacggtcggggtcgtagcgctcgggcaggagctgccccagggtgcggtaaatgatgaccagagcgacggcgaactggccagcgtcatcagggtgtcgcctccgcctgctgatcggggcctccctctcggtgccaggccccgggcgcgtggtctgcggggtggtcctccggccagccggcctcagcagggggccttctgcaatgtgagcagaaggtgaggactctggcaggagcacctgtgttccccaagactgccgtcagtgccagcaggtgcttctcaaaaaccaacagatgtcccacagaaaacagtaccgtgggtccccaaaaaatcaaaaacaggacttatcacatgaccctgcaagcccacttctgggtatacaccccaaggaactgaaggcggggacccagatacttctatttttatttatttatttattttttgagacagagtcttgctctgtcgcccaggctggagtgcagtggcgccatctcggctcactgcaagctccgcctcccgggttcacgccattctcctgcctcagcctcccgagtagctgggattacaggtgcccgccaccacgcctggctaatttttgtatttttagtagagacagagtttcaccttgttagccaggatggtctcgatctcctgacctcatgatccgcccgcctcggcctcccaaagtgctgggattacagccgtgagccaccgcgcccggcctggacccagatacttctatgcccatgttcacagcagcaccattcacacaggccaaaaggtggaaacaactcaggcatgggtcaacaggtgagtggataagcaacacgcgctccatccgcacaatggaatattactcagccttcaaaaggaggggaagtctgacagttgctgcggcgcaggtgaacctagcggacattaggctcggtgaaataagccaatcacaaaaggacaaatatcgtgtgactcctcttacaggaggtccctagaggagtcaaattcaaagacagaaagaacggtaggcaccaggggctggggaggagagttagtgtttcgtgggctagagtttcagatctgcaggctggaaagagttctggagatggactgtttaaacatgaatgtatctgatgcagtttggatgtgtggcccctccaaatctcatgttgaaatgtgatcagggttgaaaatcggcctggtcggaggtgtctgggtcatgggtgtggatcccccaggaatggcttggtgccccgcccttggtaatgagcgagttctcactctattagttccagagagagctggctgcaatggagagtcagggacctcgtcctcttagtttcaagcatgaccccacatcagagtcacccctctttttaagacacatgagataacatcatatacctgacaaaatccatttactaacaacatttccaattttaaactgtccattacagagtttaccttttcacgtcctttttatttggggaaggttttagtaattgtcatggatctgtaaaaaagcaccttaagaaaattcaaaatgttcaaactgttttgaatcataatctcaacccaggattgaagatttgttcatacacagacagcattctggcttttttgttgttgtttttttgcgggaaggggaaggtgattctaaaatgcctatttctatttagaagcagctttccccccaaccagacaggtttttgctctgctgcccaggctgggctgtagtggcacgatcacagctcactgcagcctccatctcccggactcaagcaatcctcccgcctcagcctcctgagtaggtgggactacaggcatgcgccaccatgcccaggtaattaaaaaaaacttctttagtagagatggagtttctctatgttgcccaggttggttctgaatttctgggctcaagcaatcctccctgtgtcggcctcccaaagtgttggggttacaggcatgagccactgcgcccagctagaagcagcttttcactgcacaccaaagacaaccagctcacatacaaatttcagttctcttttctttctgacattatcaattacatggctgagtatccctcagctgaaatgcttgggaacattttggaattttttttttttgagacggagtcttaccaggctggcatatctcggctcactacaacctctgcctcgtgggctcaagcaattctcatgcctcagcctcctgagtagctgggattacaggcgcccgccaccgcagctggctattttttgtattttttagtagagacggggttttaccacgttggccaggctggtctcgaactcctgacctcaggtgatctgcccgcctcggcctcccaaagtgctgggattacaggcgtgagccgccgcgcctggcctggattttgatttttttattgtttcatgcttacgctccaatgagcatttcctttaagtgtcaggttggtgctcaagaaggttcaggttctggggcatttcagatttcaggattaggatgttcagcctgtacctgagcacttgaacaaaacaacctgctgtcaccaacaggacctggcaccagagagcactcggaacactctggcccagatcttcagtgcgcaggtcctgcgatgcccgcagcggggccctcccctccctgaacgctggggactccgagggcagcagcaggtttctaagcggttttacctttttcttcaggtggtctgaagaagtcggctgggaaggagacggaggactccagctccctggggaactcttcatggatggtgtcgaatcgcgggaccctggctcccgtaaagttgaacttgtcaaagatgtcgacagcaagaactggggggacagttcctttaatcagacataactcccagggctttcttgaacccctgctgttttcaaaatgaccacaactgtcacactgacgctggctggccatatttatttatttatttttgaggtggagtctcgcagtgtctcccaggctggagtgcagtagcgcaatctcagctcactgcaacctccgcctcccagattcaagcaatatctcctgcctcagcctcccaagtagctgggattacaggcaggcaccaccacgcctggctaattttttgtatttttggtagagatgggatttcatcatgtcggccaggctggtctcaaactcctgacctcaagtaatttgcatgccccggctttccaaagtgctgggattacaggcatgagccaccacgcccagcctatttacttatatttatttttgagacaggatctcactctatcacccaggctggagtgcagtagcacaatctcagctcactgtagcctcgtcctcctgcgctcaagcgatcctcccacctcagcctcaagtagctgggaatacaggagcatgctaccacacctggctaatttttattttttatttttaatagagacagggtctcactatggcgcctggctggtttcgaactcctgggctcaagcaatctgcccatctcagcctcccagtgctgggattacaggtgtgaactaccacgcccagctgactgaccatctttagaacagaactgacttccaacttcctgcatcccgcctgtacttacacctgtctacagtgagcctggagtgaggcggggtcctcgacacccacccttctagagtctcacacctgagggtttggaagccctgccggacccccaagatcatggcccaacatctccctagcccgggacctgtcccctgggagccacgggtacgtcatcacagactgtcttcccaaaggctccatttacagatgaggaaacagaggcctacctgccgaatatttttttttttttttttttttgagacggagtctggctctctcgcccaggctggagtgcagtggcatgatctcggctcactgcaagctccgcttcccgggttcacgccattctcctgcctcagcctcccgagtagctgggactacaaacgcccaccaccacgaccggctacttttttgtatttttagtagagacggggtttcaccatgttagccaggatggtcttgatctcctgaccctgtgatccgcccaccttggcctcccaaattgctgggattacaggcgtgagccaccgcgcccggcttttttttttttgagatggagtctcgctctgtcacccatgctggagtgcaatggcgcaatctcagctcactgcaacctctgcctcccaggttcaagtgattctccttcctcagcctcctgagtagctgggattacaggcatgcaccaccacacctggctactttttgtatttttagtagagatggggtttcaccattttgcccaggctggtctccaactcctgacctcatgtggtctgcctgtcccgatctcccaaagtgctgggattacaggtatgagccactgtgcccggcctcacaatcatttttctaagagcatggccaagggggggccgggagcccacctgcttcaccccatgggggcctagctctggggcacacccctgatggtagcagggttccacccccaacgcagccagcgccttactcatgttggcggtgacgatgacgaagggccgcaggtacgtccgccgcacgttgcgtgccacgttgctgaagtagccctcgaggcgccggagcagctgtgccgtgccgccctcgctccgctggatctgctcccacgccgccctggtggctggggccaggagggcgctgcccgagtggatgacgtcctggtcagacagacagcactcagtactcagcctgcggaggcctggctcgtgggacggagggacacctgccctgaaagcctttgcttgcctagtgggctcattcattcattccagccctacactttagactgtgctctttaatattagttgttttttgttttttgttgttttttgtgtttttttttgagacacacttccgctcttgtcgcccaggctggaatgcagtggtgtcatctcggctcactgcaacctccgcctcctgggttcaaggaattctcttgcttcaacctcccgagtagctgggattacaggcacacatgtgccaccacacccggctaatttttgtatttttagtagagacggggcttcaccatgttggccaggctggttttgaactcctgacctcaggtgattcacctgcctcggcctcccaaagtgctgggattacaggcgtgagccaccacgcctggcctagttcccaaatattttttcaaaaagtttatcttaagaggaataaaaaaatgttactaagctcacaaagtatattaaaatctagagaattaaagatgcttcatattcttagcttaatttactagatgtacaagcactgcttaaatgcttggaaggtctgtttgctagccgaacaattgaaatacaaaacaaaaaatcaactacatgacatatattaattccatttaaaatacttaggggaatttcatggtctaagtttataaataggatcaaacattaatcaaagttgaattcaaatagataaggaagtctttttgtttgtttgttttgtttttgttttttgagacagagtttcactttgttgtccagcctggagtgcagtggcacagtcttggctcactgcagcctctgcctcccgggttcaagcaattctcgtgcctcagcctcccaccaccccgcccagctgatttttttcatattttagaagagacagggtttcaccatgttgcccaggctggtctcgaactcctgggctcaggcaatctgcccatctcggcctcccaaagtgctgggattacaggcgtgagcgaccgcgcccggccagaagtcattttttaatgtgtgattttcataaatcctgaaccccatcaaataagccagagagactgtgggtgattcaaatgtcagaggctgggactctggcagagtgagccctgccaggggtttttccacgtataccccaagacgctaaggcagggaagacatgtggcgatgcccctggttattacatcagaactcctcctgaactccaccaaccacgtcaagcagtgatggaaccaccacaacctgggctgcgcagaggtcccacactgaggccgccgtggacatgtggacagctcctccgagggtgaccctcagcctctgtgcaccccagggtctgtgtgaaagactgggtggaggcatgaggctgtgctcaggggcttggggaccacacccaagacagaaaccagggctgagcacggttgctcatgcctgtaatcccaacactttgggtggctgaagcgggtggatcacctgaggtcaggagttcgagaccagcctggccaacatggtgaaaccctgtctctaccaaaaatacaaaaattagccgggcgtggtggcgggcgcctgtaatcccagctacttgggaggctgaggcaggagaattgcttgaacccgggaggtggaggttgcagtgagccaagatcgcaccactgcactccagcctggacaacagagcaagaccccatcttaaaaaaaaaaagaaataaagaaaaagaaaccagaaaggaaacttgtttgtggagtcacgcatggagaacaaacgccactggcccaactctcaggctgggactcaaatcccagcaaggggaccctgcctggtctctggcggccttatgcagactagaaggttccatgggggccctgcatggactggaggccctttgtggatgaggaggtccctgagggctccgtggggatgggtgggagggacagggtgtcccccatgggctctgtgtggacaggcactcctctgggggtcctgtctggacgaagaggcctgcagcagagccacaacgaaacttctggagcccccgaaagcagtttccaaatatcaggctgcgtgagtcccctctgcattcaccctaaaacgatactgctcaggggatgacaacttccacacacacagccagagggttgaggcggaggtgtggccctctgaaagcaggacctcagagctgcgggtgggagtggacatgggggcccactgccgggccctgccccttacaagctgtgcctttgggcaaacgccttagctctctgtgcctctgtttccttacctgtcaaatgggtggacgatactccatcacaggctgcatggaagggagaggggctgatgcaggtgggccacttagaatcccttagaagccacttagatcacactacaggcactaccaggatcaccagcaaggctgtgacctgcatgtttccttccagaacactccctaacgctcgtcgtcagtttagtcaggcactgcacccgccagggctcacatttgagaaatgaggatggggatcctggacacaaccgtcttccacgaactgaggtagacgcccagccccacagcacccacccacgggcatccgagtgtccccgagtgtccccgagccagggtggcggccacccgcctacctcgtgaaagtcggcgtcctgcgtggctgccaggtcgaagccctgctgccagctctcgtgctgaaggacgtggcccagcagctggtaggccgtgcgcacgtcattgccaaagagcgtgcccgtgtgctgtgtagcactgcgcagcgccctcaccagctgcagggccctggcgccgtccacctgcgtctcattgcggctcagcttctcattctggaacagggaggcagtcgtgatgtgtgcaaacccacttcggccgctttcagtccctgctgttactcagcaactcactactgtctggtgcaagtttccttgtcagaaaggaactttaaaaaatccaaaagcctggctgggcatggtggctcacgcctgtaatcccagcactttgggaggccaaggcgggtagatcatttgaggtcaggaattcaagaccagcctgtccaatatggtgaaaacccgtctctactctctattttgaaaatactctactctatgtctctattttaaaaataaaaaaattagcagggtgtggtggtgggcacctgtaagtcccaactaccagggaggctgaggcagaatcgcttgaatccgggaagcagaggttgcagcaagctgagaccgtgccactgtcctctagcttaggagatagagtgagactccatctccaaaaaaagaaacaaaaaacaaaaagcccaaaaatgagcactgctgacagctagaccatggaaacgagggtctggtgggccaaagagggctcagagaaagatagcgagtgggagacgtgggaacaaaagccatgaaatagggcaggatcagagggcaaatggagtcaaatgcagggaccccgtgttttcagaaccaaagacacagagctgggtcctctgggggagagaagtccacgtgggggtgcctggctcaggtgccaacaccccgaagtccacaggaacctgctggctccaggctgcgggcccgtggggctgtccctgcgccatcccagccgccccaacactccccagcccaggagcctcggcccacacaaactctctcacgcatacacgaacacacacgtgcccctgctgaacacacatccccgaggcgcccctaccatggccctgaggtccacgaaggagatggtggtacagttaaagagctctgggggcagccagcccttctccccgctgcagtgtcggaccgcatttcctggggaaggagagcaggtgtgcaaagcctgaaactcaaactgttgatcaatgcttgtgtatttcaatccacaatctgaatatacttaaacccagaacactgcgtggtggttagaaccccatgggggccaggaggtcgacaccagcgcccctctttcatgtcagggccacggccgaagctgctctgacactgacaaccaggcgtttcgggagcccagccaacaggagccagcacttccgagcaagtccgtgaggaaagaaatcagcaacaccatctgccggcagccacgatcccatgcaccaggaatccatttcggctgggcctttccttgcctcactggattttccagacgcccctcacagagtggacacagtcaatgtccccatttcacagaggtaacccgatgctatgaacagtgaagccacttgtcccggtgccccagcctgagcggcagagcagggactggccgggcctgactggcgggcgtccccacacgcgctgcactgttcatgtttctgttgcgccctctgcctgctttgtgtatttcctggtagggaaaaggcgatcggatttctccccagcactttgcctgcggatattttttcaacacgaaacattccatgagtccccacatctcgactggctcctcccacaaggacgcctgcctcagttccctacacacaggccacggcgactcaccaacggatcccttagggcatggcaccgcagccggctgcccgaacttggtctgtggccaccagatgccggcctcaaatgctttgggacagccattgtagatcactggggtagagaagagagaagtctgctcagcggggcacgccacacccacgaccacaaacaggcaccactgtctgcatgcgcctccctgcaggaggccctgctcccaccaagaaccgaaccctagcatctcccctgcccccatccatgtcagagctggagaggggtgaccaggctctgacccacaccccctcacgcagaaccaggtttctagaaggtcaagagaactcagaacacgagggagcccagggtcccccaaacacccagcgtgcatgcacacacgtgcacgccagtgcagcagcctgtccccgcgctgtaacctgcagggtgtcgaggggcaacgcggaccttcacagccgagcgtggtgacctcggcaaacgggttgtcgcagcggttgcactggcggccgatgacgccgggcttgcaggcacactgcccggtggccatgtcgcaagtgcggctgtgggagccatgggggaagcagtcgcagggcagacaggtgtcctgggctaggagcttgtagtaattctcctgcaaaagccagaggcagggcctgtgacttcagatgcccgggagaggccctaccttgcagcgtgtttcccgagcgacgtccagactcccacccgggtgtgtgtgttggccgccagccatcccacccctcatggctaccctctgcccacatcccacacccaacgggggctgcctcccaaggccccacaaggccggacccaggagagcagttcttccgggaagcacgccctccctcatgtcttaacaagtctcaacagtgggcaccttcgtatttgtcctaaaaagaatcagagatccaaatggaggcttacgtatggggatagcccttgggcgtttttttaaagttgttttgaaaaattagaagccacctgaacgtccaccattgggtgggtcagggtgacaatcaagagcttgtacttcgggttcagaaagtcctgggttcatgcctgacccttgccgtttaccagctacattgcctgggctggtcaccgggactccccaggcccaagtagcaccccctcaaccccgccccggaaaacggggcaggctgtgaccaggctgtgacttgggcagactcgtgagcaacgttcagacctgtgtgtcaggtggggactccgactgtgtgtaaaatgacagtgaacgacaggcccagaagagatgctaaaacactaacaatcacagctgggaggcgcatggggtgactgcgatctttatgggtttttattacattttgtataactttgtttttttatttttttgagatggggtctcactgtgttgcccagtctggagtgcagtggtgcagtcacagctcactgcagcctcaacctccagggctcaagtgatcctcccacctcagcctcctgagtagctgggatcacaggcaagcatcagcacgctcagctaatgtttttattttttgtagaaatgggagtctcactatgttgcccaggctggtcttgaactcctgggctcaagtaatccctcctgcctcggcctccagagtagctgtgattacaggcatgagccaccacgccctgcctataactttggatgagaaaaaaatcgtaggcaagttttcgccaatgcactccccatgttctctctgctctgccacccactatgccaccaccgccatctggtgacgtgtggaccgaccctgacccaggagagctgtttaatttgagcctttcaggacacaagtcccatttgctgttggaaccaccgcaggcactggggggggacactactgacatcacgagatggcatccaagggtgccctggtaccagcttccctcctagggccagccgcatctgcaggaagctcacgtccctcgcccaggctcctgttaccctcagacctaacatttgggtttcaagtcactgtgagcgccatggccgtggtgtacacgaagatcctgaaggaggtgatgtatcctgagagggctggggaggggtccctagagtctgcactgagaacgcgtgtgcatttctggagacacgagatgtgagctccgtgctgcatgcaggttaggactgaccgccctggacaggcgtggggcataacgcacttagtgacactttctattttaaaactgctgtcatcatgggacaccagcttggtaaagaccaggaaaatggccaggcacggtggctcacgcctgtaatcccagcactctgggaggctgaggcgggcggatcacctgaggtcaggagttcaagaccagcctggccaacatggtgaaatcctgtctctactaaaaatacaaaaattagctgggcatggtggtgggcgcctataatcccagctactcaggaggctgaggcagaagaattgctggaacccgggaggcggaggctgcagtgagccgagatcgcaccactgcactccagcctgggcgacacagcgagactctgtctcaaaaaaaaaaaaaaaaagaccaggaaaatggccaaccaggaggccaggagggccggggtggtgccatagatgagccagccctcagaaacgggtgggcttcccacagccatgggcagtaggccgggaggaggcagggattcctgttccacgggcgggggctggcagggctgaacccgtagtttacacgtggaaagcagccatggagtattcacagagcacgggggagcagcaaggaaaccaaaaaccacatctgtacacaaatgtgatgtgagtgggcacaggtgtgtgtgcaggggtgtgagtgtgtaccgacagggtatgtgaaggcgtgtgtgtatttaggggcagctgtgcatgtgtgtgagcaaacacagcatgcagggatcatgggggcggggcctcaccttgcattggcactggccgttggtcttattacagtcgggatcaaagcctttgctgacggcacagtggcagggtccacagacggggttcccccaccagcctctggggcacggaaggtcgagtctgtggggaaaataagagggcagctggaaggtttatgtaactgtgctttctggaatgagaagaggcctgcaggcagcatggagatggttgcccaggaggcctggctgggtccagctctgggagcttccccttccacgttacatggcctcagtctcccctctaccggctcccaacctcaccccccacccacagatccaccatgcccaaagcgactgggatgacatctctgtccaccgtgtgccccacgtccacatgatgcctgactcattggggcttaatgacaatgaacccccactgcaaggctggcctttcacgatgcagccccaggcagactgagctcagctgcctggcacaacttctcaaagtggtcttggggtgaatgccagcatgagatgcccgcaggaagctcctaaacagggagttttgtagcttttgttgtcccccaggtcccctggcccccagacccacagatgctcagggcagccatgccctggtgtagcatgccccttaggacggcggcatgcgcccgtgcactcggaatccagcagaagccagtcctgcctccctgagcctcccccggcagagagcaacagacactgaagatgagcaacactgcagggacaaagccaggcctccgaggtgctggccgctgctgtgcatgagtctccctacctgttcctgacagggctgcacctgcgcagtcacctgaaggcccacctgcctgcaacggccccgcccgagtgtcctgcgggctcctgcaatcccccctggctaaccaagttccctccacccagctgccagcctctagcattcactcacttggcgagcaagtattaaggactgtgtacaaatcagggtcataaagacaaccaggccagagatagagtctggcgtttatggatgtgtgtgtgcagcgtgggggccccagaaccttcatccccctgcagcagtggtgactgtggcgccgggcatggagatgctggatcagcctcttggcaactccccctgctccaagctgtgctccatgcggcaggtgggggttccctaagaccaggtcctgccactttagtgctgggcccccacggcctccacacagccgaattctgttcctggcttgcgggcccacctctgtccccacccaggcctctctagatcagcctcatccccttactcctctccagcttggctctgttgctttcgctcccagaatgccctcccgcttcagccacactggctcccacctccctctccactcccagggcacctccgcggcgctctccctggcatcacatcttgctgatatccaagaatgatgtggtgccatcttctcgtgaggtcaccagctccagggcacaggctgcttcccactcatggggtcacagccgggatcacagcacctgctctaggctcgggaggacaaagaacggagcatagcaggtgtccctgcacctgatggccaccagcagctgaggacaatgagccacaggggcatcacctccacggcggcctggaaccttggtttatgaagaacccagcagctccaccttggacaaagtgacgcttgtgatgactacgcacctgtacccagcgatccccgtgcaaagggtacagagcccagagcccagagagcacgctgctgcctgtcctaaccacactaggatctccgcacacatcagaaatgacttcaagcccagcgactcgacagagaaagcattctctgtaaaccacatgcgtctccctgcatctcatggggcctgtttgctctgggcccagtgaggactccaggtgagtcatttgcatgtttcaggtgtggacacatgatccaatggggttagtttgagacgtccaaattgattctcattgcccaagcgtggtggctcacacccgtaatcccagcactttgggaggctgaggcaggtggatcacttgaggtcaggagttcgagaccagcctgaccaatatggtgaaactccatttctactaaaaatacaaaatattagctgggcatggtggcgggcacctgtaggaccagctactcgggaggccgaggcaggagaatcacttgagcccaggaggcagaggttgcaaggagccaagatcgcgccattgcactccagcctgggtgacagagcaagactctgtctcaaaaaaataaaaataaaataaaaattaaaaaaaatttgattttcacttaattcatgccaaattaaaaaaaaatatgtccctgttacccagaatcacacatatctttgggtcaaaataagaaagagaagacactgagtcgagggaacacagccacatggactctgaaggtgcagggaggcaccaggggctgctcttacttgttctcacagtacggcccgtagtgactgggcccacactcgcacacgtagccctgcggggagccgggggagcgcacgcaggcccccatgttctcgcaggggttcaggtgacaggcatccacacagtttattccaaggtaccctgcaaggacagagccagcattacctccacccacaatccacgagaccttccacgttaaaatatctggagcaacctgtcccctccagaagatctgactttccctggtactcagcagagggaagaggaagagtgccacagagtccccgaaaacacagcgttaggcgggttagacttagtgatgcagagaggaaggccttcccgggctgccccaaggagggtgagagccttggaacacggggcccaggctgccccaggacacatggggaatggccaccagcagaagatgacttaagcacctcaaaactctgaggccaccctgaatggaggattttcttaatatgcacttttcactaattcttttatttatttatttattgagaagagtcttgctctgttgcccaggctgaggtgcagtggcatgatctcagctcactggaacctttgcctaagaagctcaagtgatcctcccacctcagcctcccacgtagctaggactacagatgcgtgccaccatgcctggctaatttttgcttttttttttttttttttttttttcgtagagatggggtttcaccatgttgcctggctggtcttgaactcctggcttcaagtgatccacccacctcggcctcccaaagtgctgggattacaggtatgagccactgcacccggccttacttttcactgtttctttgctgatcaccccatgtgctgaggagagcgcctggggcactctgtgccttgagtaaggaagaggctcagagtctctctctaggaggggcccgcttgttataaaataaagctcagggctccacggaaccacagggagttggctggggacgctaatgtctaaactgagcccccctcctgtgtttcagccataagagacctccctgtcactgaagggccccgggagggcggtcccacctttgtcacagacgcagctgtagtcctcccaggcgtcgtggcagcggctattggggggacaggggctcgaggtacaggggtcgtccacatcacagccgtccttcaccctgaccttgagtgcgttgttcatgttcagggtggcgacgttggtgggcgtcccccccatcctcactccctgcattaagtaaacggcactggggctacaggagcccggaaaggtatgtaggggttaagggaaccctgagacctctctggtcccttgcgaggcattcatctgtgatgcctcatttatctacagagctggggcgggcagggttgttcctcttgccccacggcctgctggccggagtgcagtggagggctgggtgaggagctcagagggcacgccagcctgagctcctggggtgcgcggtgggggcgtgaggagtggatgtccctgccgagggggctgagagctgaacgactcagagcagctccctcggccgtagctggaacccctggctccaggggacaggcacggggcccacttgggtgacgtctgtggttggactgggtgggggtggcggcaaggggctcgattcaggacacttcacaaaggcagaggggcaggtggctggcatggcggtggggagctgtgggggccagggacggcccggatgccaaggggaaccgcaggggagaatgggtctgaagaggaaacaggagctgttaaagtggggatgcctgtcagacaaattcttcactcgttgaaagctaacaggttgaccaacggaaccacctatggtgctgccagcctcggagctgcctgtgaggggcaggcctccccccgccccccacaacccccacgcacctgcatgcagcctcggaatccacggcgcacggagaccttgtcttcagaggcgcctccgaccaccacgctccttaccgtcagcccgggaagcatgcccccgatatctgccttgttctgtgcggagagaggggccggggatctgggggctgcatccaccatcctagaaacgtctctcagatgggaaggatacactggaagtctaaacagtcacttcaacaaactccgcagagcctgaggacatctgggcctccaaagagagagctgggcccagctggacagcgaggctggctgtgatgaccagggcgaggggaccaggccagaggatgggtgtccatgccccagcctagctgaggcggccagtggggtcaacgtgggcaactgtcccgcctccgtcaagggcacaacactaaaccagccacgctgtgacagagagcttggcgagtcaggaagactgcagtgaacggaaatccgctcactcattaacactgtgggaacccaagagggtctcggctgagatccagtcccagaaaggcaggtgcctggaacacacctatttactcccaggtctgtgttgtaagatgagccttggctccaagagctcttggagatcccaggtcgccccttaagtgtgtgggcatttcacagacaacatcttgggttacctgcctgcaaactgtggaaacctagtttggttaagtgttccgaacattgtctgggataccaccacctgcctgcctgggacatgtgtggctccctggtgtctcacaggcctgtccaggacctgggtctcactgctctcccagttttgctccccatccatgctctgagggcacgggccccagcattgctacttcagtaccctaaagacatggtgctgagcctgcaggtgttgctcaagatggctttgctaaaagaaaccactgctgaaggcaccaacagcatcatgatgagaaatgcagctggaggaagtcagctgctgactgccgggggcggggcatccggatgaaggaggtgaggaagatgccagtgacctcagtacagggcagaacagaagcccacctgcggggacccagaaagtgcctccccaaatccacaaggtctctggtgggtcctggcacgtcaaggggtcattctgtttttccctgggccggaggaagggtctatccccagaggaggtgcaggtgccagctcacctggtccatcccatagtccaaggtcatggtgaccaggtgcttcatctcactgtcctccttaacattcttcagctcgatcagcaggtggtgccactccccgtcggtcacccgcaacccggacagcatcacggactccacatcggaggggccgtgggacacctcaaactggaggtagttgttcaggatctggagcagggagagccacaccgactgattggtacaatgacaatgaaagagaaaacattttgcagtcacttaaacaaggaagctgtgaaaggagactgattatgtggcaccagatacaagataggcttaaaaattaggcaaagttggccaggtgcggtggctcaggcctgtaatctcagcattttgggaggctgaggtgggtggatcacctgaagtcaaaagttcgtgaccagcctggccaacatggtgaaaccccatctttactaaaaatacaaaaattagctaggtgtggtggtaggtgcctgtaatcctggctactcagaggctggggcaggagaactgcttgaacctgggaggtggaggttgcagtgagctgagatcgcagcattgcactccaccctgggtgacagagcgagacttggtctcgagaaaaaaaaaaagttaggcaaagttggctgggagcagtggctcaggcctttaatcccagcacgttgggaggccacagcaggcggatcacctgaggtcacgagttcaagaccagcctggccaacatggtgaaacctgcctctactaaaaatactgaaattagccaggcatggtggcaggcacctgtaagcccggctactccgcaggctaaggcagcagaatcgcttgaacctgggagtctactagaggttgcagtgagccgagatcgcgccactgcactccagcctgggagacaagagcgagactctgtctcaaaataataatcatcattagacaaagttggctgggcgtggtggctcacacctgtaatttcagcactttgggaagccaaggcgggtggattgcttgaggccaggaggtcaaggccagcctggcaaacatggcaaaacctcgtgtctactaaaaatacaaaaattagctgggcatggtggtgtgctcctgtaatcccagctacttgggaggctgaggtggaaggatcactcaagcccaggaggcagaggttgcagtgagcctaggtagcactactgtacttcgacttgggtgacagagtgagaacctgtctcaaaaaaaaaaaaagtataggcaaagttgttctttgttgctgttgcctttaacactgatcagaattgcttgtcttattctacgggaaaaaggatcaatcgcttcatggaggtcaagtaagggaagcgccaagaacaagccccattaggcttttaagtactgggacccagctcgattcaggtaactactgggctcctatttttggatgtaaacattatactttataagacaagatttaatcctctgtgtttaattacatgtatgaaaaaaacaaaaatcagcattgcaactggcctaaaacactcatattttaaaataaggtaggccaagggcagcgtgaaaatcttagatctcctaagaaaggacttggcaatttggaccacctctcctcttgaaatcacctacgaacatgagacaaaatattaaagaatgtctgtttgaagacactgaagtggctccaggcaaaacagagtttcaggctcacaaccaaggaaaagacagaatctgcaaaacagcgtggcgtgtgcttccctgcaaggccgtcagctggttctggaagacacagtggaggctgagcgtgcagtcaggtcacggctgccaggtacctgaaacccctgccctccttggcactcttcagccctatcagcaggtggtacgacgctccatcagtcgcctgtgacctagagtctcaagatgcctaaaagctttctaggttcatggggctggaggattaaaaactggggttcatggactgccaagggttgttccttggcttctggttggaaccctgaggggtttacactaacgataaaaacgaaaaagagccacctttgcaggactggaagcccagctttgaaccacctcagtctgtgactgcattaaactctgtgactttgggagaccaaggcgggtggatcacctgaggtcaggagtttgagaccagcctgaccaacaaggtgaaaccccatctctactaaaaatacaaaaaattagctgggcgtggtggcaggtgcctgtagttccagctgcttgggaggctgagacaggagaattgcttgaactcgggaggcggaggtagcagtgaaccgagatcacgccaccgcactccagcctgggcgatggagcgagactccatctcaaaaacacacaaacaaaaaagtctgtgactgcattcaagtgctctgggagggaaagtgctcctagtggttgccagaagcaaacatggaagataatgacatccccatcatccccattctagtttctctttttcttttttttttttttgagacagagtttcactcttgttgcccaggctggagtgcaatggcacaatctcagctcactgtaaactccacctcccaggttcaagtgattctcctgcctcagcctcccgagtagctgagatacaggtacccaccaccacacccagctaattttctgtatttttagtagagacggggcttctccatgttggtcaggctggtctcgaactcctgacctcaggtgatctgcctgtcttggcctcccaaagtgctgggattacaggcatgagccactgcacctggcccccattctagtttcaaatgctctctagtttttcaataaaatgtctagcactcaataaaaaatagccaagtatacgaggatataaggtaatatgcttgaaaaccaagagaagcaaggaagagtggcaacagaccacagattcatcagacacagactcaaaaataacactgggaaccacaaaactttcaaggaaacagactcagtgagacaattagacttacttctgggtgtaggtgttacagagataagggtcaaacggccatgtttaagtacatgtaagaagaatcagaaaacaaggttgtaactaacctaagatgctcatatttaaagataacttcaaaaaatagcctagattttagaaaaacaactattagcacactgcttatattatacctgaaatataaggatacagaaaatgttgaaagtaaaaggatagaaaaaaatacatcatataaataccaaccaaaagacaaatggtatagctatgttaatatgagacaaagtagacttaaggcaaaagtcctcactacagaaaaagaggaatttcataatgataaccaagtcaatttgctgggaagataaatcagctctaaatttgtatgcacctaataacctggcctcaaaatctatatagcaaaaatcaagattactaagagaagtaatagataaatctacagtcaaggtagatttgtaactaacttctctcagtaagtgaggagacaaagacaaaaaaacaataattaaaaccaataggctggcgcggtggcttacacctgtaatcccagcactttgggaggctgaggcgggtggatcacaaggtcaggagatcgaggccatcctggctaacacggtgaaaccccgtgtctactaaaaatacaaaaaaaaaaaaaaaatagccaggcgtggtagtgggcgcctgtagtcccagctatttgggaggctgaggcaggagaatggcatgaacccaggaggtggagcttgcagtgagacgagatcaagccactgcactccagcctgggcgacagagcaagactctgtcacacacacaaaaaaaacaataacgatatagaatatttgaataccacgattaacaaatttaacctacttgatgtatatagaacagtacagataacaactgcagagcacacaggggcatgtgtacaaaactggctagaggccaggcacggtggctcacaactctaatcccaatactttgggaggtggaggcagacagatcacctgaggtcaggggatcgagaccagcatggcctacatggtgaaaccccgtctctactaaaaatacaaacattatctggatgtggtggcaggcacctataattccagctactaaggaggctgaggcaagggaatcccttgaacccgggaggtggaggctgcagtgagctgagattgcaccactgcactccagcctggtgacagagtgaaactccgtctcaaaaaaaaaaaaaaaaaaagaaaaaaagaaaaaaaaaactgactagatctgggctgtaaaccacatttcaaagctctgaaaccacatggtatacattctttgacctgcaattatgctaaaaacaataccaaaatgatttactagaaaatgctacatgaggctgggcgcggtggctcacacctgaaataccagcactttgggagatcgaggcgggtgggtcacctgaggtcaggagttggagaccagcctggccaacatggtgaaaacctgtctctactaaaaatacaaaaattagctgggcgtggtggcacacacctgtaatctcagctactcgggaggctgaggtaggagaatcccttgaacctgggaggcagaggttgcagtgagcagagttcacgccactgcactccaacctgggagacagagtgagactccatttcaaaaaaaaaagaaaaagaaaaaagaaaagaaaacgctacatgcttgctaacctagaaatctacttctaaatatcacatcagtctaagataaattcatgagagaaaacaggatacaggttttaactggctgtaaagattatgtaactaaaactgtattttgctttttggtctctattgatagtttgggtttttggtgggggaggggggcacacacacacaaaaaaacagatgcacacctggctaatttttgtatttttagtagaaacaaggtttctccatgatggccaggctggtcttgaactcctgacctcaggtgatccacctgccttggccttccaaagtggtaggattacatccatgagccactgtacctggcctgatagttattttaagaagataacttttcacctttttctattttgtcttttttttgagacagtttcgctcttgttacccaggctggagtacagtggtataaccttggctcactgcaacctctgcctcctgagttcgagtgattctcctgccttagcctccggagtagctgggattacaggtatgcaccaccacacccagctaatttttgtatttttagcagagatggggtttccccatgttggccatgctggtctcaaactcctgacctcaggtgatccacccgcctcagtctcccaaagtgctgggattacaggcgtgagccactgcacccagcctccattttgttttcttttgttctatagaagtcagcttattaatttcctttgcttggccgtgcacagtggctcgtgcctgtaatcccagcactttgggaggctgaggcgggtggatcacgaggtcaggagaccgagaccatcctggctaacccggtgaaaccctgtctctactaaaaatacaaaaaattagccaggcgtcgtggcaggggcctgtagccccaactactcgggaggctgaggcaggagaatggcgtgaacctgggagacagagcttgcaatgggctgagatcatgccactgcactccagcctgggtgacagagcgagactccgtctcaaaaaaaaaaaaaaaaaaaaaattcctttgccatctcttgcattgttcttgcttaaagaactccaaagtgagcagatcagtgataaaagtgatgttatatctacaaacaaaagtgatatccacaggatgaacctgttttatgggaggtaactgagagtgtgtccccagctctcagtcagagaggcattcagcaatctcaaggttatcccacctgacaaggtgggtggattttgggtgcccgagagcaattatccaaattgcttgggctgtgggattacaatggagtcttctttgtcccaccacagtggcaggggcacaggagacatcctttgagggacagccaaactgctgctttacggagctcacaggcccacgggaggcctgcaagctgataatggcaaggagaaatcccccagaaccttcggtaacgtgtggttgaccggcctctgcgagctgccctgggggccttctgggtgcccagtggggtctgcagcatcccctcaaggccacccctccagccacccagacttccacagggagggctggctgtagtccctggcaaaattcctaatctggggatgagccctccatgatgtaattacacaaacagcaccggagtctgtggcttccagcaccattcctactgaaagcgcacttttttcctacagagaccccactgccaaatgacaacttgcaagctccagttcatcacctgcatccaacagccaatttaatttgttctgacagtgaaaccaccacacagaaaataccatccccaggcagcaccgcacttgccaagttttggcctggagcaagcttctggggctgcctgggagactcatgaaattacaggttaacaagggcccacaggccagctgtaatcatccctggcgcacaccacaccttccaggcaatccgagaggtctgtgctggaaaatgctcccgagctgtgatggggaggaacaggaggctccctgtccaggcctgagcccctgccccacagccccgacccatctcctgagccctcgctgatctgctgagggactgacctccaccagcctgctgggagcactctcggtcctgcccccgccacactccaaccaggcactcatgatggggagggcatgtgctgggcagtccctctgtccacccgccaaccctcatgccaatcttggctatacagaactgtttctagatgggctgtccttaggagtgacagagaagggcctgtggctgtcccaggaacctgggcaggaaaagaaccatagggtccctagtgaagagcctctacgcctcagtttcccgtgtgtggaacgagagcttggagcaggcactccgtaaaatccatctcacctctcaccatctgaccttagcccagcttcccctgatgcgggatggtgtccaggacacactcggcagcaaaagaagcccagagcccaacggagcaaaggcaataaggcatggctccgccacggcacacagctgatggcggaggacacgcagcccagacgccgctttgggagggacttcctgaccgcaggagcggggagggggggtcatcctgggagaacagggtgagtgttcccgtgtggccgaccccaaggcaggagaggaggctaacctaagggcagcatctctgtgcgctgaagggaggtcaggagggagccccaggctcactctggttggagataatgaacaaccagaaggaagtcagtgctgctctgagaccatgtgcacccaggtctcatcacatgggtgcacacacatacatatacagccacatgcacacagacatgcacaaatgtgcacgcatggagagatgcacatacacagactgacatgcacacacacttgcacggagatatgcgcacacacacacacaaacttggagaaaagcataagagtcacatctgtaatcccagcactttgggaggcggaggcgagtggatcacctgaggtcaggagttcgagaccagcctggtcaacatagcaaaaccctgtctctactaaaaatacagcaaatttagccaggtgtggtggtgagctcctgtaatcccaactacaatggaggctgaggcaggagaatcgcttgaacctggggggcagaagttgcagtgagctgaggttacgccgtcgcactccagcctgggcaacaagagcaaaactttatctcaaaaaaacaaaacaaaacaaaacaaaaaaaacctaggatgaaggaaggaataactcagttatgaatctgtcaaatcaagacagagcgccctgctcaggcacggctcccacaggccactcccgtgccaggggatgagaattaggcctaaggagagacataaagggagctttttaggagggagaattgcccagtgagttttcagagctagaccctgatcagaaagggtcacagcagctgggtttacaggagagcgcccgtgccccgccatcactacagacgagaatgaccttcagatgcacaggcagaggggcaagagggcaagccgagggccgggcaccctcctggggagggtccccatggctgcctcatgcggcggaggttgtggcagaagggcagcccgatgacagaagacagggctcataactgtttctcaaacaaagtgtctacggagcatggaagatgcgagcagaaaccgtgtggcgcagaaaaccggaggaaagagtgcattcgaatcaccttctaaaagctgttcggaatttttatccaacaaataaacttttgtttcaaataaacgaaacagtaaagatcaataagacagagaaaacaggcagacagcgacagagcggggctttaggcatttctgggctgaggcatctcaagctcccagagaaagtggacgtgcattggtgccaaccaccacctggctgtggctttttgagatggagtctctgtcttgtcgtccagactggagtgtggtgacacgttctcgggtcactgcaacctccgccttccagattcaagtgattcccctgcctcagcctcccaggtagctggggttacaggcccccactaccaagcctggctaattttttttgtatttttagtagagatggggtttcaccatgttggccaggctggtctcgaacttctgacctcaggtgatccgccggcctccgccacccaaagtgttgggattacaggcatgagccaccaccccggcctgcacctggctgcagctttaactggtgaggctcactgtttccgcctgaaggctcggcacctccctcagttctgcaatgcccacgctccagccaaaccctcaggctagagggagaccagaactgccgctgagctctgctgggccccagggttggcccagccccatgctccctcgctgtctccgcctcccagaggaaagaaagggctgatattccccttccccctcttcggagaaccccaggggcgggcgccggaggaagggcgagtagcaggtgcccgagtgtgcaccaggaagcccagcgcctgggtccctccctcgggcacccacctagcaggtgccttggtggcacggggccccagtcacctggaggcgaaagctggtgggcccaccactggtggcctccatcagaacgctgtcctccttccgggtccggaacatgagccccaggtaccagggcacagagatgatgatgttcaggtcactccaggacacgacgctctcaccgctgaagagctgggggtgaggcatggctgcggacacaggcccagggacctcaggtgtctcccgaaatcacacggccgcggacttggctgcaggggcgggggatgggcctgcaggctaggcctgggcctttttcactttaacacgaaggtgggtctgagcctcccctctgtgacgcatccagccctcacagtcagccacgtgggctccagagaagcgcaccctgggacgtgagcctccttgctgggaagcatgaagatctgcaggctcccagccacagatgggcgtggtaaggggctctcaggcttgacaggaggcagacgggggcgggttcaggatccctgggctccgtggctggggtgctggggctgggctctgccggcccagcctacctgtcccaccccacacctgagggactggggaccccagaagcaggagcaggggctctgcggaggacagtctcttggagagggcggtgtgagtccacagtaaatgcagcatataccaccagaggctgccggacctggatgtgaagccccctcacggtggtcccgggcacatcaaggagcaatgcctcccaggccgccgtgaccggggggatggacgacgccggccactcaccttgctcacagttcttcccgccgaatcggagtggacactcacacagatacatattccacctgttgacacaggtgcctccattctgacaccgcctcccatcgcagaagttcctccgagcagcgcagcctggcaacacagagcgtgcggcagagcctgactcggaggaaccgcccggggtccccggcgccagacgtggcgtgggaaaccaggacggaatggacccggggctggacagaagtcagaccaggtctgaacgcccctggcaacggcaggaacatgggaactaagaaggtgctgaacgcactgaccacatttggagacgctgggacgccaggccatcacggcagccggcccggtcacctggtgacacatatgcaagaccctaggatcatgtgcgcctcgggttagctggctgggccagcagtgccaaggcaaccccaaactgcagatgcaggaactgcggagatgcacatctccagcctggactccgggttccatcccaggagctgcccaccgctggacacatacatttctaagaaaaacacggctccccagggatctgcaagcagtgacctctgtgtggctgccgacgtccagccagatgccactgcggcagctccgacgccctgacggccacccgtaccttcccgggtgccattgttggcgatgaatccggccatgtccacatttttgccgtcgactgacaggttccgcatgcagcccacgaactgccggttgtgcactgggaagtcttctggcaggttggggacaccccccaggagtagagggccggtcagatccagggacctgggtaggtaaagccatcttctgtgacgtcagggcggggagaggcggccacggcgggctgggctccgcagttgcctctgtgtagcctctaccaccataactacttcagaaaccaagcagacaggcggggagaggccaaagtcagagggggctcctgtgtctggtgccgccactgcctccgtttgctcacacttgtgttcagtcctgacgatctgggtgtttcacgctcaccagtgaccaccaagccccgcccacccaggctggtccacaccgagacaggatgtgagcgcagggagcacaggtcaaggccagcagggactatactttacccttgcctctgagaccttctaggaaaaggaagggccttgaaaggaggccagaagaaaatgagaacccagcactttgggaggctgaggcgggcagatcacgaggtcaagagatcgagaccatcctggccaacaggatggtgtctactaaaaatacaaaaattagctgggcgtggtggtgcatgcctgtagtcccagctactcgggaggctgtggcaggaggatggcttgagtccaggaggtcaaggcttcagtgagctagaatcgtgccactgcactccagcctgggcaacagagcgagaccccatctcagaaaaaaacaaaacaacaacaaaaaaacataagcctctgggaccagctggctgacacagtgcttcacttaacagagtcctggagtcccaggtaccagaatttgcggggacaaagccagtgatccgtggagatggggctggagaccgtctcggggtctgcaagctggccatcacaaccctggggtcggcctggccactcttgacacatacttagggagacttattctagaaggtcagagggaaggtgccccaaccatggacaggatgtctgactctagcctggaatgaggtcgccagggcactgcacccagagtgcctacgtggggccctgccctgggaaggccgcagggtgagcatgtttgggggtacggacccccagggcctcccctcctgggatgctcacttcttggagccggtctgagtgccctgggcagcgcagctgtagttcccgatgtcctttccaaagcgcacagccatggttgtgtcacaatcatccactgtcaccacggccatcttttccccggacggcccatggggcaggcccaggtggccaatattgggctgtaagaagagaaagcacagaaggtgtcagcgttttctccaccagtgccctcagcaggcgcacctgtcactcatagagcgaggaggacatggcacagggtgggcggcacgtagacaagggatgaggagcccccggcctttagttccccaaactagctgtgctgggctgctcaatgccccctcaagttctgcttcccagaatctcagaacgtggcctggtctggacaaagagctggtgctgatggaattagctaagatgcggacgtcctggagtaggcgggccctgatccaagatgactggtgtcctcttaagaggacagatgctgagatgcaaaggcacacagggagaagctgcgtgaccgcggaggcagctgctggagcagctgtttacaagccaagggccacctgggccaccgacagctaggaaaaggcaggaagggtcctccccttcagccttcggaggaggcacggccctacccgcgccttgacttctaggcaccagactgagagagaatcatgtctgttgtttgagccaccctgtccgtggtactttgtgatggtggccccaggaaatgaagttgcagccaacacccaagtcctggggcccctcctgtgaacacccgcttctgctcttctgggggtgtcctcctgaccacggcacctggccaggttcgtgctcctggagtacagacaccaggaggccactgcccggcctgcagacggccccacatctcccctctaaggcgtggaactccctctctgggccaggattgggtacaagagttcttctggaatcagtgaccttgggtgaaacctttcccttctccaagagactgtggtttgccatccggggacgagcccactttccccagacagccctcgcaggtctcagctcctggtcagtccctcccaggacacgaagcatatccacccagccagcctcagacgcccttccaggaggaaaagcagcacccgccctacacaatccatgctggccacggaacttaagcatgtgggtctcaaagttccagaaacacagttggtgccagctccaaccgggacaggcaacagaatgtctttcatctgcacaacctggataacaagacctacatcccacaggtggccgtgacgatgagccaggagatcgccaggcaagtgccaccatgccccacaattggcacacaatgcgcagcagagcctccccctccaccccagagagaaccttttcttccagtcccagcagggtccctcccaccacccctataaaggatgggttcgatgcctcctcctgatagttctggggtcagtttgagtttatagcatgatacaatctcatgcttctttataaaacgtggaaatagatcgttgtaaaaacgtagaatttaattaaatcatcctcagtgccttttaataggaaaataacaaccacatagttcattcaaaaataaatcttcagtttttaataggaacaaagtatctattttgatcagggaaacgaggctgaaaagcaggacacacaactggaaacaggagctcagccagatggccaagttgcatgacttctggggaccctggacacccaggcagcacgccctgcctggagttgtgcagtgggcagcctgcacaactgtatgtggccaccccagctgaggcttctcctccctcttatccaatcatctaacgtgagtgagacccatgactgtacctcaatttctttttgtgcaagataacgatttactattagaacacacgtcctctctgtgttacagggaattgaggatgatatcaacagagatacgtgagtttcccacacgcccttgtctgtaaatccaagggaggcttctaccatgacccctggtattcgaatgcatggatcacctttttcatttttcttttacatcagctgatgaaatcacaaggtctgataagctgtctccttaaagactccacttttggttaagcaacaggtaggcgagtgcattaaaaatcatctgttttctcgctgtgtaacgcggcccactttggaaaacgcgtggaagtgcccattatgggacgcttaaatgtgagatgcgatcccagggaaaggagaacctcccctcactttgtgagccccaccttatctttacaacttataatttacatttttggggctgggcgtgagactactggaggaagggcgtaagtagcatttacactgggaaggctttcatgacattaagctactgtttacaaaactgcagttgctgtaaactgctgctggtaatcaatggctcagagctacggattcaagcaaaaaacagcaggataaagaaagctggaggcaaaagacaaagccaatgcaatccacgcttgtttttcgagtggcactgactcatgtgagacacccactgctaggacacctgacttcagtctggccttcgtgaatcagagcagcaggcacagggcgtttaggaaacggtctctgatagacagcgcccaggatgtgctgctcgattctgactcccagagacacccaccggcggccactgggtcaaaagtaacagcacttttggcgaaagagccgaatgttctcaggtggagagctggaagaaccagcaggagggctgcacagaggagcggggggatctgtggggtctgaggtccctgctgctcggaggagaaatcacagcatcccgatggcccatccctctcctgtcacccctgaataggtgctgagtgaggctctggtttaaaatgcccgcctctcggcgagtgtgggtttaacgcgcaggctaaccgtccactctcccgcctctcggcgagtgtgggttaaacacgcaggctaaccgtccactctcccgcctctcggcgagtgtgggtttaacgcgcaggctaaccgtccactctgcagttgaggccagcaagtgtcacggaggcagggagtgcatggacacggtgctgtgggtgacctgagacgcacagacgggggtccccaaagcattaaacgcagaactactacatgacccagcaccaccagccccaggcgtgtacccaaaagaactgaaaacaggaactcaaaaaccagttcatgagtgttgacggcgttgctatttacaactcacaagaagtggaaaccacctaaatgtccatcagtagatgagtgggcaaactgtggcccatccctgcaccggaatcgcagccaccgaaaggcacgaagcgctgacacacaacggtgcgggggtcccggaacacatcgcgctcagtgaaagcagccagacacgaaaggccatgcaccgcgtgactccattcctacacaatgtccaggacaggcacatccacagacacagagcagacagatgttgccaggagctcagggaggaggatggggggtgactgctaatggtatggggtgatgaaaatacttcttttgagatggaatctcgctctgtcacccaggctggagtgccgtggcatgatctcggctcactgcaacctccgcctcccaggttcaagcgattctcctgcctcagcctcccaagtagctgggactacaggtgcccatcaccacacctggctaatttttgtatttttagtagagatggggtttcaccatgatggccaggctggtctcgaactcctgacctcaagtgatccacctgcctcggcctcccgaagtgctgggattacaggcatgagccaccgtaccatccagcctgggtgatgaaaatattttattattttttaaaaagttactattggttaactgatggcatgaaaacattttagatctcaatagaagtggtgtggtacaatactctgaatatactagaagcccctttaaagcttaattttatgctatgtgaacttcacctcaataaggaaaaaattaaaaaaaaaaaaagattcctgggtgggcatcccccctcaccagccccctgccactctccacctgaagaactttcgggaagatccttccaatttttccctgacatggagagaaaatgcattatttggccttcctgccaggtggctatgagtgataaaacgcagtcagagaggtgaacattctccaggaggggtcgagaggcgcatggacaattacacaggcggcttgaatagggataagtgaaaacagcagcagatgtgtgtgatctgggctcagatcatccatttttgtcaaaggaagacaaagtgcgtctccgctgaaaggccggcgtggagcacgaggcggcggcagagaaaagactacgtggtggtaacagctcccgactgtggggtggcgtgtccgcctctgagttttccagccaggaaaagcacttggtggcttggctgggtcacagctgacgatgaatggtacaggttgcagaggggggcggataaggaatgagacagacgaaccgcctcctcacatttctaagaggaatttttaaagtttgccacatatttatacaaaagaaaaagacagcgtgggaatgaagggggccacagggttgtgtctgagttttttctcaattcttgtgttggaaagcgccgggcacaggatgggccaaggccagcacggtggaggccccagcgccccggcacctgcccttccagggctcagctgggtactgcgcagcagccggccaggcccagaggaccccccccaacccctgcaccaacaccccttgcaggaaaggcaattcccaggcctcgcttccaggacataaagctcagtagctggacctggtcactcaggccgagcaaggcaggcagcgcacacagtgactggagacagcaggggctgcccacggtacctctacacccctcggcgggcaaccctggccagcacaggctccctggggcaggcggaaacagagccagcaaggaaaagccacatgctcactcctgcagccacctgagaaaaaacctacagtgccgctgagcactgcaaggagtggcccagaagcgctaagctgtgcagatccggaatcctgctccaggagtcatccccggggtccagcctcttcttattttccttcgaggtattttcttccctgcgtgcaggccctcctccttggcttccactcagccgctctacgcagtgctgggagtttctgtgtgcgcacaaaagcatttggtccttacgaagtgctcacatttctccagccttttaacctgctgcagacgattctgcattgggaggccggtgggggtacggtttcaatgctggggaaggtagcaggggaaggcggtgtgggggggtgggaggggcacgtcttaggaaatgaatgaattcatgctctgtgtcagaaatgattaaccaacgttcatatcaaagaattcacagatggctggacctcaggaatgtctgtacagagtcaaactgcagcgctgaacgttccatgctgtcatttctcaagatgacaaagttcaggcctgtctggccgacaaatgccccaggaaatgtgggcaagaccccgtgccagttctggcatggagacgacaagctctccctcggaggcagccactgcagttctccgaagctgcttgggaaagtggtgggaagggtcacgaggagcaaattcacgcagatgcacgcagccttccagaattcaaactggcctcccaggagcctcggacaggactttgccagaatgcaaacctcagaccgagctgctacttcctggtggtcccaatacccctaggcaggtaacaggaccctgttccgccaggtagccaccctctacacaggggctgccggctgcttttgatgacctggctcgaagggtgcggtattcccccagggctgtcagcagcaaaccgtctggaagcccaactgagccactgggccaccgggtggggagggcagctccacactatcccaggttgtaaggggaactcaagttcctctgcccaactctggctgagggggacaggtgctcctgaatccctcacctgccagggacctggggcagaagacatactctatgagcctaggcagactcttctagaaagggggtaagtgcatagctgctatctctagggctgtttgggaatgaaatgaaaggacggatctgaaactgtgcagtgtctgagctggcgtggctgatattactatcatcctcattctcaactcagagtccagctgggcgggcccaaggccggcggggggctcacaggacagcagtgtccacagcatccaatggacatcacctccttaaagccaagggtccatatcctgcccctacttgggaaagtcacatgacttccctgcatgccaggacttggctgtacaactgggggtaaaaatagcatcttcctcgtgggacgacatgaatgacatgtgtgaagtgcttgcagccatgcctgctattgttacttcttgaaaagatgtgaagaaaagcaaaataacatgcaagtggttttctcaagttttgctgttttaatacttccctatattaaaataacataatacaggggctgaacgcagtggctcacgcctgtaatcccagcactttgggaggccgaggtgggcggatcacttgcagtcaggagtttgcgaccagcctggccaacaaggtgaaaccccatctctactgaaaaaatacaaaaaaaattagccaggcatggtggtgggggcctgtaatcccagctacttgggtggctgaggtggaaaatcgcttgaacccgggagacggaggttgcagtgggccgagattgtacaactacactccagcctgggcgacagagcaagattccgcctcagaataaataaataaataaattaaaataaaatataacataaaatcataaagttgatttttacatctttaaagaaaaaagcagcaagtaagcaactcgtgcaattagcctctccgctgaacccgcaggctcttctccaggagctaagacgcaaagccacctgcagcttggagttcgggcactggcccgccatttcctccatttattcaactatccaagaaagtaatgcacggtgctattaggcttattgtgggagcattagaaaagttttcaacaaaggtcagaaccaaccggtcacctagagattcttaaagaaatcacacaaagccttttatttctcaggcaagggggtctaacccgtttccccgatgattctggccaaagacaaaagtgaggagctctgtgctttcctgatggacgtatacagtacatttggaaacacaagaaccgtgggtccggaggcaggagtcccctgggcatgcgtgttcagcactggacggagataagctcctcctacagagctccatgatccccgtggtagttaattttgttctggaaatgatccagcagggcaccgtgccagcccccactgagccagaccctggaccaaagcccccagttccatgggaggaagccagggccatctcagccctgctcctttggggctcagccatcgggaccaggtcacctctgcggccaggctactcccccaggtgttttgggagcctgggaattatatggggatttgctcagaggggggtcttcttgccaatgacaaatgaagggccaaaatgcagtgagatacagcgccttcttggaaagcaacacgttccttctcttggggattttataggcaaaaagttgcttggtacaacctgagggaccctcctcaagcactcaacaagaagctcactcatgttcctctatgggtgggaggcatctcaatcctaatgctactcccagctagagaaatcctgacaagcgggacaaggaggaacgcacacttccgagctgcagcctcccggggcctgcctcctccacacgggcaccgggacagagtgcctgggatggggcctctgagctcagcccccacaacacagtagcctgagtgtcccgggaaaaacaggagaaaacttcaggaaggatggcaggtgggctacagttccctcgaaaatgacttttctgagcaagcaaaaaagcttaccaaaaatgtgtacactcgcccactcacactcacgtgtgtacactcacccacactcgtgcatactcaaacccacacgtgcacactcaccactcacactcaaatgcgccctcacccatgcacatgcactcatactcgtgcacatttacccacgctcacgtgcatacccgcattcacacccacatgtgcactcccacacgtgccttctcacattcatgtgcatttattcatacgctcacacgtacacttacccaaactcatgcacactcacccacgcacacgtgcactcacccttatgtacactcacccacaatcatgtgcatactcaaaacccacgtgcacttaccgacactcacactcaaatgtgcactcacccacacgtgcgctcatactcacatgtgcacacctacccacactcgtgcatactcatccacattcacactcacatatacactcacccactcaaatgtgccctcacccacacgtgcactcattcatactcacatgtgcacacctacccacactcgtacatacccacattcacacccacatatgctcacccacactcaaatgcactcgcccacacacgtgcactcatatatgcacactcagccactcatgtgcactcacgtatgcactcacccactcgtgcactcatgtgcacatttacccacatgtgcatgctcacccactcaaatgtgcactcacccacacatttacacgtgtgcttcttcacacacgtgcacacacccacacacatgcatactcacccaggtgcactcacccactcacgtatgcactcacacgtgtgcacacgtggacacacccactcacatcattcatacttgcatgtgcacacacagatatactagcacacacttgtgtgcacacatgctcacccatactcgtgctcatgcttgcacaatatactcacctgtacacactcaccttgcacacagtcttgcacactaacacatgctcatacaaagtcatggcctgctcctgtaaagacctaatagtcccctctctgtcctcgatctgggcccgcgggacccccttccttagtccccctgcctcttcttgccctgatgacctttctgaccagcctccctccctcctggcctgcatcccactaaggggtgacatgctcagtatctgtgtgataaggtgaaggtggggagagggctgaattgggggacagagcatggaagcgcctggataagacagggagaaggtgggggccggggatggtcacggcaggaaaacgcgacagccctcggatggcacgtcccagagcagcggatacacgggtgggtgagagatgctgggtccatggctccgcctaaacccggccctcccatcatctactctgtgcttcagtttcctcatctgtgaaacagcaacagcacctcctcctccaggagctaacatgaggatcacgtgggggacacacatgagcctggcacaagacaggacatcagccagtacacttcagccaccaccaccctccctgccgaggtgctgggggggtagaggcgggaaaggccaggagcccagagaggggagggaggcagccgtggcacagtgcatctcagagccccagcagtgaggggttgggtggggtgggaaggatgggggtgagacagaggctgctggaggacagtggctatgatgccagacaggaagcaacctcagccgggcgtgaaactgagggctgctccagccctggggcgactttccataacagggttctgtaacacaaaggcccagggtggggcggcgcttgcctccgagaatcaccacgtttccatagcaggtgactttctaccacctgaccaggcctgtgtttgggaacggaaaccaagtgacttatctgtcacatcacatagcagcatcggggcagcccccacctgccacagcgcctgcaagcagggccctgcaccacctttctggcagagctcgctagccacctgaagacccctctatcggcttctatgcccccatcacttgggctcaaggaggcaggaacatcctgagtccgagatgcagggtaagtaaaggcagtggccgccgacttcaccaactgatgggagcacgtgcagactgccttagcagaggccccactagtggatttgacagaacacctgctggggctggagaagccagggaagctcacgaagggcgtgacctttcacgcagccacggaacacctggggagcatccccatcccctcctcttaaacacggaacttcctatgagacagaatcaaagccaacaaggccctgagggcaaaattaccagcctgcatggccacctcctttatcataaggattttacatactttgcaaggcttaattaactttgtaaaagtttagcttctttatcttacatattctgtatatccaattatctttttgtttattttttttgttttatttttgagacagagtctcactctgtcgcccaggctagagtgcagtggcacggtcttggctcactgcaacctctacctcccaggttcaagagattctcctgcctcagcctcccgagtagctgagattatgggcacctgccaccacgcccggctaatttttttgtatttttagtagagatggggttttgccaggttggccaggctggttttgaactcctgacttcaagtgatctgcctgcctcggcctcccaaagtgctaggattacaggcgtgagccaccgtgcctggccctcaaatgatttttttaaacagaatatttaaaagaaaaaaccagggccgggcgcagtggctcacacctgtaatcgcagcactttgggaggccaagggggggcggatcacgaggtcaggtgactgagaccatcctggccaacacggtgaaaccccgtctctactaaaaaaaaataataataataaaaaataaataaataaataaataaaaattagccgggcatggtggtgggcgcctgtagtcccagctactcaggagactgaggcaggagaatggtgtgaacccaggaggtggagcttgcagtgagctgagatcacgccactgcactccagcctgggcgacagagcgagactccatctcaaaaaaaaaaaaaatggctcatagtcccatgacccagataactgctatattgtttttttaaatacaaagaactcaagtgcatgtaagaaggcacagaagggcataaaaggaacacgaaatccacctcactttgcattcttcttcccattggtatccacctttgctataagggccacgatgatgcctcctgcactgtacgtctggcctctgcaatgccacctcctggctcttgccaccaatggtccatgtctctacctagaggctgggcttggccacatgacctgggcaacaggacatcagggcacaaggacacgagataaggcctggaaagcaccgtgcactgggactcgccctctctggctgctaggaaccccctgccaccaagtgaacggccagggtggcctgctggaagatgagaggccccagctgccatggctaacggccaggtcatatgagtgaggccttcacacagccctggctgaatcgcatagaccagaagaaccagcagccaaaccactgcatcaccaggaataataaatatctgatcaagactccatgctggccaggcgcggtggctcacgcctgtaatcccagcactttgggaggccgaggggggcagatcacctgaggtcaggagttcaagaccagcctcaacatggagaaaccccgtctctactaaaaatacaaaattagccgggcgtggtggtgcaggcctgtaatcccacctactcgggaggctgaggcaggagaattgcttgaacctgggaggcagaggttgcggtgagccgagatcgcgcctttacactccagcctgggcaacaggagcgaaacttcgtctcagaaaaaaaaaaaaaaaaagactccatgctttaggcagtttatgaccttgaaaaagctatccgatgagcactattaacaagtatgggccgggtgcggtggctcacgcctataatccagcactttgggaggctgaggcagttggatcacctgaggtcaggagttcgagaccagcctggccaacatggtgaaatcccatctctactaaaaataccaaaattagccaggcgtggtggtggtgcgcacctgtaatcccagctacttgggaggctgagggcaggagaatggcttgaactcaggaggcggaggttgcagtgagccgagattgtgccagcctgggtgacagagtgagactgcatctcaaaacaaacaaagaaaaaaaacacaagtttgttgttttggagagcatagggttatccttcagaaaaacatatgtatataccagcaaacattgtaaatcttaaaaaaaaatttttttttaagacaagagtctcactctttcgcccaggttggagtgcagtggtacaatcatggcttacaacagcctcgaccttccaggcccaagtaatcctcccacctcagcctcccaagcagctgggaccataggcacatgcaccacacacccggctaatttttttttttttactttgtattttgaagagatgtattctccctatgttgcccaggctgatcttgaactcctgggctcaagcaatcctcccaccttagcctcccaaagtgctggggttacaggcgtgagccaccacacctggcctgaaagttattttgatgaaactttctattttgagacaattttagaggtacatgcaattgtaaaacaataatacagagatatcccatgtaccccttacagtttccatccatggaaacaccctgcaaaaagatagtataatatcaaacccaggtacaaacactgacacagtccagacagaacgttccatcactacaaggaccctgcctgtgtcctatcacagccacacccacttccctcctgtccccagcccaatcccaggcaaccactactctgttttccattgttattctgtcgtattaagaatgtcataaatgccaggtgcagtggcttatgcctgtaatcccaacactttggaagcacgagatgggtggattacttgaggtcaggagttcaaaaccagcctgaccaacatggtgaaaccccttctctactaaaaatacaaaattagccgagcatggtggtgtgtgcctgcaatctcagctacttgggagccgaggcaggagaatcacttgaacccaggatgtggaggttgcagtgagctgagatcgtgccactgcactccagcctgggatacaaggcaaaactctgtctgaaaagcaaacaaacaaaaaaacacaatgtcatacaaacggaatcacatagtatggtccttttgggggttgccttttcccactcagcagagtgagaagttgtttggtgctaagaagtattccctgttccatggtacggacataccagtttgtttaaccattcacccagtgacggccatctgggctgtctcccatttggggatattatgaaaagctgctgtaccacttgtgtgcaggtttctgtgtcaacatgaatcacatctatattcatgaggaacagtggtctgtggttttgtttagtctgtcttcatctggtattggaatgagggtaatgcttcatgaactgaactgggaagtgctctctattttctggaagagatgttgcagaattgatgtaattctttaaatatttgttagaattctcttgtgaagccatctgggcccggagatttcctttttgggaatgttaaactacaaattctatttcctcaatagtgtatacagccattcaaaggactgacttcatcttgggtgagttgtagtagtttgtgttttttgaggagttggtccgtgcatctgggttttaaatgtacacatgtagagttctttttattaattattcccttattaccctttttaacatctacaaagcctattttattcctgatattggcaatttgtcttctcttttccttatcagtcacgctagaagttttcccccgctttgaaaagattttgttaatcttaaagaatcggctctttgtttcattgattttctctattgttttgctgtttcaatttcactgactgctgctcttatctttattatttccttctttctgctggctttgggtttattttgttcttattctaggttcttgaagcagaagctcagattattgatttgaaacatcccccttttctaatgtaagtatttagtgctatacatttccctctcagcactgctttagctgcagcccacagcttttgttattttggatttttattccctttaaatttgttttaaaaaccttccttcttcccttcctcccttcttttttgaataatgaaatatttcagtcacgtctctatgcagacccatctccaactgctggagtcggctagtaccatcagggctgagtgaggcagagcagcaaggctggggagggcgcagccggggagggggctgagtgaagctgcagcctggtgaggttggaaggttgtttagataatggaaggttgagaaaaatcactaactatactgaggaaaatgagaacaaggtttctaactggtaaagagttacacatatagaagaggaaaaacaacaagaatgacctctaactctgcttgggttgctgtaacagaggctgagcgccttgtaaacaacatgcatctgtttctcacagttctggaggctgcgagtccaaaatcaaggtgctggtagattgaacgtctggcaagggttcgccacccggttcctagaccacaccttcttaccacatcctcacatgacagaaggggtgaggggcggtcttggggctcttttataaggacattcattccactcgcgggagaccctgatcacctcccaaaggctgcacttcctaatactatcaccttgggggtgaggatttcaatatagcaatttgggggtgctatggtctgaagtgtcccccaaagttcacgtgttgaaacttcatggccaatgggatggtttcaagagatgggccctttaggaggtggtaaagtcatgagggtgagcccctcaagaatgggataagggcctcaataaaagggcccatgggagtgggtccactgtcttgcattcttccgccatgtgaggaccccagacgctgccatttatgaggaatgggccttcgccaggccccaaacctgcaggtgctcaggcttccagcctccaggactcagagaaatcaatctctgtggtttgtaagtacccagccttgtgtgttctgttaccaggcagcacgaatgggctgggacggcatcagggggatgtgaatgtgcagagcagagcaaacgcagcagtgctccagtgaagttcatggcttccaatagggagtgatagataaataggaaaaaaagatcaatatgaagtgtgtgtgcatgtatatatgtacacacacacacacctacacagacgtctatgtcctagctctgcccagtaagagagactgggagtgagacaccccaaagcaatgagcacaccaagcacccagatctggatttctaaatgccaccctccactaaaagaaccaggctcggccaggtgcagtggcttatgcctgtaatcctaactgtttgggaggccaaggcagggagatcacctgaggtcaggagtttgaaaacaacctggccaacatggtgaaactccaatctctactaaaagtacaaaaattaaccgggtgtggtggcgcgcacctgtaaacccagctactcaggaggctgaggcaggagaattgcttgaacctgggaggcagaggttgcagtgagccaagacagcaacaaaggcgcctgggcgacagagcgggactccatctcaaaaataaaataaataaaatacaccctacaactatggcttttaaaatctagtaacaagatcctgggagctcctcccctcatcaccgcacagaaccccaccgcactgttggcaatggttgttgacgttccgctgtcggaggaccttatattctattaaataccttccaagttcgtttctgtaagttggattctgtgcgtgtaattggcactcaattaacatggaagggagagaaggagggagggaaagggaaggctacgtggcctcacccaggggaccacacaactgtctaaccacggcagatctgtagagcccagaaagggtcccatcaaaaaacctcaccctgacccaagtgtctgggtggaagtcctcgagtttttagaacatgtgcagaaacggagaagctcccccgaccccaggggtgctccgggggtacatctcccactctccttgggactctggggtttaatgtgcagcacagacccaagaggttttgaatgacctgacaagcaacaggtgagcaatccctaatgacagcaggacctagcggtcatctcaaggtcatggaaatctcaaagcacttacatcctctgctcaacagaagcagaggccggtcctccggtttgttgcaaccgggcctcatgctgtctttataaaagcactttccgcagcatgccaaagacagccccgcgccatctcagaatcaccagaaccagaggaagccaaattgccgaggcagagtcccaaggactccagcagccagctcaggcatggggcttcattgcgtgtggtctagccacccgtggccagcatggcgatcgcgaccagcacagcatcgtccccggccaggtgacggatgccgagtgccccttggagaccacctgctgcccacgtagaggctgctgcctcaagctccggcccagggtctcgcatctccacctgaagctaccaggactcccgctagctgagctcccgtctcactagcccagtggttctcatccagggcatgacctcaggggcctgacaatgatgaagacctcttggttgtcaaaaccgggttaggggaacagctggagtctagtgaccagaggtcaggaatgctgcccagaacaggcctcacaatgaagggtcatcgtccccaaggggcggcagtgcccaggtgggaaatcctgacgcggctgctcaccgcctcccacatctgcttcatgcgggatctcccagcagctctgggcctcctggcgctccacctcactgcctcactgcacagctcactcacgggtccccagcgggccacactgcctggtgtccatgtcaggcactacctcccctgcatgtccctgcctccccagctggccaggagactgtgctccaggctctgggcaggctcagctggctttagaagatgcccaggtcaggtggacacgagccacccttgcttccccagggccccgttaaacatcttgctggcacgtctgtgtccccgaccctgccaggagctcctggaacaaggtggggtctaaacgtgatccccgcaggcagcctcagggaagcacagtaagggaatgacccgctcagtgcagccccgaggatccccatccttccagacggcccctccctagcactgtctccgtggggaataagcttctccccacacttcccaaacacccaggatgccgagggcgatggaggagcagcaaacacttaagcataatgagggcaaaaccgattctcaagtggggagaacgttttccgtcaggcatgtccacccttttgaagttgtggacacaccttcaaaccagccttgagggaaaaaacaaacaaacaaacaaacaaaaaaccagcctggggtgaagcaacgactgaaaatgctccactcggccccaaacctcccggcgtggctgtgggcgtgggggctgtgttgttcatctgtgcttggcggagcgccacacaaatgtacaagtgcctgcctttgaaaagaccgtcctggaaaaacgtccgactccaatgtaccctttggttttgctgaaggtgaattagaccaataaaccttctcgtctaaaatgtcatcaggcagaaaggaaaaataaacagactctgcctgctccctgcctgggagggttccctaccccatggcttctggtggctttggccagtggggagccagacgggaggatagagtgagggaggggaggggtgtcaggagggtccctggttagctgtgcccctcctgggtggtccgcagccctctcctgtggcttctgaccatgaccccttctttctgggctccaatctgccctttcccttgatgctctaggactaagggccatcgcagctccgctggcactgcctccagccctgggtcccacaccgcctctcatggatgccccatgccctgcccagccctttgtaaataacccttccagggctggtcccactggagcaccccatctgcttcctgtggggaccctgactgctccaccagcctggcagctcccaggccctgtacactggtgggtgggggaagggtccccgcaggttgcacgtggaggcagtgcaggaggccactctgacaggcaacacccgggagatcatgctcagatctaaaatgcaggtggcccacacctcagagacacagccactctggagggcgggggacagagaacgagactgaagagaggagggtgggcagcagcggcatggcccgcaccaatgcttccaccctctccagactgctgtatgctgaattttttcaagtatgttttcttcatcatccccaaaaatgcaaaaaccaaaaccagcgaggtggtgtggcaggtaaatggagcgtgctggggcaaggacacagctgggcggggcaggggggatgaccgtctgcatcagccaaggcaggcagggacgcgtgtgcaggggggttccctcggcagtgtcacccaccaccctcaagatcacccttgcagccccagccctgagcccctctcaactggtcatggccctggacacccctcatcgtccagccccaacgcctcctcctcctgggggtcccctcccaccctgagcctgtcgtcttccccaaaaccttccctggtggcccaaggtcacccccaaggtggctgctggaggacaggaccagaggtgacattggagacaaagtggaggcccagagagcagaggaaccagcccccagaagattgtcttcctgacctcaagctggcccccgccacccctccaggcccccacactgctcccaacctgactggtcctgcccccagctcaggtgcactccagaggaggcctctgcacctgggtttgtcagagctgccactcggagactaagtcacggagcagcagtactgtctccttctcgggctggtgctcataatctctgctaacacatcctagtgtgtggccccgtcagacctcctaatggacgcctgaagacacagtaaaaactggttggtttcctccatcaaataacctcaggcaagagagagaagtatctggcgctcgcaggaaaggcctaatcccacacgggaggctgtgctcaggcaccgctgacaggacccggccctagacacggaagccatggatcccggtaatccaccgtcctctgtgtatcttcttacatgaggcccctctcctccgggacagtgcaggtggcgtcctgcacggggactttgctcctctgagctcccggaaaggggcggccacaggcgggccccagtgaacactcactgtgttcagagccagggcggagtgtggacagaggtggccacagtggcgtcctggctgcgagtccctctgcaactgcagacacactgttgcttctgccataggcagatgatgattctggagtgttgagcactgatggggagaccaaggctgactcgacctccccctgcctaccccctccccagcaacaaacgttcatctctggacttggtcttctgatacgtgcaggaaggaaaatgcgccacctatgccctatgcttccctgacgatggggcaccgtctccagggtcccctgtggcccagcccttgggaggcaccaccccagggggcattgagctctggtgtccagccccagctggctggaagggcacaacaggaagggtcaccaggtcagagtaggcagcgccaggcagcaggacgcaacggccacccgtgcagctcacccaggtgaacgcgcttcacactggctagcactgccccacacagccacaggacggcaccgtatcaagaaaagactcggtctttgaaatggacaatggcagcaaataaatccgcgtctgtgagggctaccctcttcctcttgctcagccctgagcccctcaccccaccagcccctgcacctctgtcaagcacatggttctccaaacatcagccaagccccactaggggtgacatccaatgtgcggcagcccagaccctgcccagacacctgccagccttctctcaatatccccccaaaccccgagcaagcactcagctcccaaacctcaccagcacctcccatctgccctcctcccaaatgaggctcaagctccacctgccctgggttggcactgatgggacagaggacaaaaactatggtctctgtgcaggtgaccactacttggagtctgtgtggcacgcctgggagatgatgggatattcaaggcagatgggaggggcgggccagggaggtggagggacgccggtggccagcatggaaaggagagtgaaagccagtggaggcgacactacgacctcaggcccagtggctggaccccaactgctggtgagtcgcagccaggcacagtggctgtgaaagaaggaagatgctctctccatagaaggactgggtcgattctcctggaggacagaggagccctcgtctgccaaccaagcttaggccccagccttgtgaagtccgggaagcggggcacagcgggggtggccaggctccaggaggagccggtaagacccacgcagacccacgagcaagcgggggcacaccctggagcttcccaagaagagaaaagggatttgcaaaatcacagccgtggaaagcacagcattttgatgcaaaaaacaatgtgtttccttacaagccaacgaacagcaaaataaagtgaaaccaaaaccacccagccttcacggcacttccttgaagagtgttctggctcgccagttacatccaggtacagtggacgattttggctacagagccgtgtatgaacagcccagaatttcagccactagtagactctggccaaggtggctgcaaatgaataagccctttctgtgtccctcccccagcgcaggagatctccggggtccctgtgtaccccccgacccagagctctgggtgggactatgaccccagcacagggctcaggtgtatttacacagaccctccacaaatgtgcatttcctaaaccattttttccaatagcacatttaaaaaaaaattcagagcacaaatgtctcaagacagaaaatctaccagggcaccttttttccttccttttttttttagatggaatttcgctctgttacccaggctggaatacagtggcacgatctcggctcactgtaacttctgcctcccaggctcaagtgactctcctgcctcagcctcctgagtagctgggattacaggcacccgccaccacgcccggctaattttttaatttttgtatttttggtagagacagggtttcgccacgttggccaagctggtctcgagctcctgacctcaggtaatccacctgccttggcctctcaaagtgctgggattacaggcgtgagccactgcgcctcgccccagggcaccttctcgagccgccctggggccagggggaagtggtggggcccatcttaccttgttgtagtactgcacctgcacagagtgccaccgcccgtcactcacaccactgggaaccttcggtgccacggtcgttgttgtctcgcctgcatggtgggagggagacccagagagaaaacaggggttggcggggcctactggggaccgaggattgcgctgtgaggcatcagggggagacaggtgcacatggccacgtcctccctcccctccccacggcaccatggtgggaggcgcccaccactccatccattttcttttctggttacaaaagtaattcttgttcctcttttctggttttgtttgttttgagatggagtcttgctctgtcgcccaggctggagtgcagtggcgtgatctcagctcactgccacctccgcctcctgggttcaagagattctcctgcctcagcctcctgagtagctgggattacaggcacccaccaccacacccggctaatttttgtatttttagtagagatggggtttcaccatgttggctagtctagtctcgaactcctgacctcgtgatctgcctgccttggcctcccaaactgctgggataacgggcgtgagccaccgcgcctggccttgttccttttctaaatatgaaaaaatataaacacggaaaacccatctgtctgtaccagcagcagtcacacctacaccgcaccagaggtcgaaccctttttcctatgcattgcatcaacgtagacaaaatcatcaaaaccaattccactttaggtcacttaatcaaataaatgtcatctcaggcttttaacaactcttaaaccacgtaacacgtcccatcgtgaggtcgcggacgcgtctcttgtgcatctctgctttggggtgtctgtcatttccaccccttgagctcctgctggagtggggcgggcgagtccctttggggattctggggcacaaccctgagtcagcagcagcagctgggaggaaggagcttcaggggcaccaaaggacaggtgcggtgggtaccaggtcccgggcagagaataccgtctccagggaaccagcaggagttctggaaacgggtgtgggagacactggccaggggaatagcctaatcccacctcacagagcccggagggctatggccacctctcccatggtggttggctgctgttacaggtgcctccctttctttattgagtatagaaaacaaagctccatcctccaccatcacacacatgtcattcaacacgggccagggttctagagacggaagcagctctgagccatcttggtgaacttccaggtgaaggaggagatggcagaattcactcctgaaagtcaagtgtgccaggctgagcctggtggctcacatctgtaatcccagcactttgggaggccaaggtgggcggatcacttgaggtcaggagttcaagaccagcctggccaacacagtgaaaccctgtctctactaaaaatacaaaaattagccgggcatggtgaaacgtgcctgtattcccagctactggagaggctgaggcatgagaatcgcttgaacctgggaggtggaggtcgcagtgagccaatattgcaccactgcactccagcctgggtgaaagagtaagactttgtctcaaaagaagaacaaaaacaaaaaaaaaagtcatgtgtgccagaaaaacacagatatacctgttggcagtctggagaaatgttcttttctaacaactggaataacatgtttaatggccttgtcgatatattttttttaaaagagacagagtctcgctatattgcccaggctggtcttgaacttctgagctcaagcaatctgcccgccttggcctctcaaagtgctaggattacaggcatgagccaccttgcctggccagccttgtccaaaaaaaaaaaaaaaaaattttttttttttttttttttgagatggagtctcactctgtcacccaggctggagtgcaatggcatgatctcagctcactgcaacctccacctcccaggttcaagcaattctcctgcctcagcctcctgagtggctgggattacaggcaagtgccaccatacctggctaatttttgtattttcagtagagatggggtttcaccatgttagccaggctggtctctaactcctgacctcaggtgatctgcctgcctcggcctcccaaagtgctggggattacaggcatgagccactgcacccggccagtgttgacatttttaatctagagatgtaccacaatttaatgattccttggtttctgaaaacatgaaccagatcgtccacatttccagcactataaataacactgttatgaacatctttttattattattattttttgagacagagtctcactccgtcaccaggctggggtgcagtggcgtgatctcacctcactgcaccctctgcttcctgggttcaagcaattctcctgcctcagcctcctgagtagcggagattacaggcgtgcaccaccacgcccagctaatttttgtacttttagtacagagggggtttcaccatgttggtcaggctggtctcgatctcgtgaccttgtgattcacccacctcggcctcccaaagtgctgggattacaggcgtgagccaccacgcccggcctgttatgaacatctttgtgtactttggatttcttaaataagacagcttcctagacctacaagtgagggatgaaagggtaagcagcttggaggcgctgcacagggcgagggtcgttttaacccacaaagtatctgtgaattgctcagagctgcccttcctggggagaaggccccacctgcagagaaggtgagctgcacctgctcgtccacgatctccagggcgatgaagtcgtgcttctcattgaagcggccgttgtagagaagcaagccgttcctttcctgagtggcaaacctgtggggccaagcagaggcacatcacaggatgaagaccccagggtccaaaggctgcctaggaatgacaagtccagccggaggagggcaagcacgtggggctacgattcaggaaagaatggtgtcaggcatgcgtccttctcataggagcagacagcccatcaagcttgataagcagggttcttttctggaagcagcaaaccagaatccatggggagtctggttactacggcctgtagaatgcaaaaaatatcccatttgcacaacatgctacaagtacgaccagcggccaggacacctgttactgatgtgtttgggcaaagcacgtgctgtacattttctgctgctgtgaacagatccccccgtgtgtgcgccagggcatggggacctggtaccttcccaggcagggatgatgctatggaaggaccattcttatggcctctccccccggcactcagccacaatagcatcttttggctcccaaacacaggtcaaaaagaccccagggcctttgcaccagctgccccctatgccagaaacaatcttcccaggctttgcagatcactcaggggtcaacccagctgtacttgccctgactcattgtactctaccttgcccttacctcccatcagcctatgacatcactcagttaatttctgaaatcatgctgctgactcattggtttataagaatgtatgatccataaggggaggaaccgcagctctcattccctgctgcattccagaacccaaagaagatctggtccatatcagtgcttaatatgggctgtttgaataaatgaaaggaagaggcatgaacagacgcctgaacatgaacaggcctgtcagaacttagagcacgctgagcaaaaaccacctgctcgggcaggagatcatcaaattctcagaaatccttctcccacccaggggccccgggcagggggtcttcagacccaaatcaccacaacacctcccccacctccctggtttcagagaacttggcaacctcctgagtgagcttgggactggctcctgagctggctgggtgtctccaccatcagagatacacggcaggaactccttttaacctaaggttggtttatccattttcctgcagcaggagtcggcccgagccagcctcgagcatctgacctcagccttttctctggagttaaaattgatggtttcggctggccggtggctcacgcctgtaatcccagcactttgggaggccgaggtgggtggatcacctgaggtcaggttgaccagcctggccaacatggtgaaaccccgtctctactaaaaatacgaaaattagccgggcatggtggtgggcacctgtaatcccagctactcaagaggttgaggcaggagaattgcttgaacctgggaggcggaagttgcagtgagccgagatcataccaccactgcactccagcctggcaacaaagcaagactccgtctcaaaaaaaaaaaaaaaactgatggttcccaactgtcgcccaaaccccctctctttagaatgcaagcaagaaatgacgacaaacacaaagaagaatacccacacagcacactgatgcttgggcagggaatgagcagggagaagggatcttaatgacgacgggaccaactcagtgcaggcttgtttcctgagactcagcccctgggtcatacctgattgcctttggtgggtttcacttctgtgcggttccctttggacccaggtgggggctggtgggcggtgtcagtgtcaaacagtcctgcacggcccccctggcaagcacacgtacaccgctggcgacggagcaataaagaagggacccaaagccgaggggagggttggaacaatgcaagcaaaaagcaaaaaaaaggagaggccagaaaacagaaaccaaggcccagagaagggggccggggaaggagaaggaaagaacaaagagctgtggggatgagaggcagctgggaacggagcccggagcccacttgggagcctggacacttggcaaagagaaactagaaagaggagaaggggctatgaaagcacccacctgaaacaaaagcagctaggcgccccccaacccggcccctcacagcggctctcagaggctcaagagggccctgcccacagcccccactgctcccaaagtgtcactgccctggaagcttggggaggcaccttatgattttacttttaaaggtattccctacaaaaccctcggtgatttagggtcagctctgatggtttagccaccgtcacacataagggaaactgttcataattgtccagtgcaataatctcagacatacagaatctgacaagcagcagcgtaacattcccttgtgcagacatttaattaaacgttattggaggtggagaggatagtggtggtcaccagaggctggggagggagcagggaaggggctgaagagaagtgggttaaggggtacaaacaaagacacagaaggaataagcttttgtggttttttttgagatggagtctcgctctgttgcccaggtcggagtgcagtggcacagtctcagctcactgcaacctccaccttctggttcaagcggttctcttgtctcagcctcctgagtagctgggattacaggcataaaccactgtatccagctcatttttgtgtttttagtagagatggggttttgccatgttgactaggctggtctcaaactcccaacctcaggtgatccacccgcctcggcctcccaaagtgctgggattacaggcgtgagccaccgcgcctggcctggagctactcaactatcaaaggccacacacggaggacatcaacgtcacgatctagagggatggggtgcacggagaagctcgcccctttcctaaagagacccccgtgtggcgcggcgggacgcacactcacgtgagggagatggtgaagtggaagcgctgtctcaggccccggaaggtgacgaaggactggggcgggaagctcctggtggtcacctcacagtagggcctctcatactcgccaggaggacacacgcagtggaagccgccgatgagcaggttcacgcaggtgcccccgttcttgcacaccccgttggcacagcggcctgagcgggcatccacctcacagtgctctcctggggggcgagaggaagatgccagagaggaggttaccgaccagccagggaaaagccaacgagcctgtcgcagaccctggacacaccccagccacacagtcagctgctgaaagaaaacccgactgactccaggacaggtctgtgacatgaacagaaacccctgagttctcaaggacttgcccagagccgtgccagagtcggctgcacccagctcctggtgggcaaactaaggatggtggccagggggttcccaaaaagcactctgtggggtcaaagaaatggcagcaatgagcccttcccagcctccaaccccgttctgagcaccctgcaggctgagctggactcttctgaggggaacgcctagaaacagaccagagcacctcaggcccctccccacacctatgcccgtgccacagcagaacacagcagagcctcgtcagagatttggagcatgctgccatcacatgacccaaaggccaccttctgagcaggccacctgccctgactgccgtccgccctcccacccctcacacagacccctcgcactgtctggccacccctggattccaacccggttctaatctggcccgtctcgcccaccagcctgtgagctcctgaagggcaggcaccaccctactctgatgtccttcctagagtttaaactcttttgtgacaggaaggttctggaagctttcccagaaaaccagccaggcagcccacagcacactgcctctctccatccgccctcagaccaggagtgctaagaacctcatctgctcggagggtctcagtgttcgccatgcttcgacccagttgttcctggactggccgctgcatcctccagcaaccaggtgtgtggctggtgacactcccgcccccggacagggatggtgagccgcaatctgcacagcccatgctgcctcccctgcctccaccacatggggagttaggctaattttttgtatttttagtagagacggggattcaccgtgttagccaggatggtctccatctcctaacctcgtgatccgcctgccttggcctcccaaagtgctgggattacaggcgtgagccaccgcgcccggccagtatgatcaatctttaaaatattttgcatctctgacaaatggatctcaacgatcttttcatttgcatttatctttgatgaggccagcatcttttcctgttttattgacaattgacactctctttcctagaagctgcctgagtttgtctttctgctgggtttttggtcctgctcttattgtgttatagaagctcctcgtaaattatggaaggaactattgtcattttcatggcaatttcccccagcttaatgtttaacattaggttttatgtatttgtagccccacagaaattttttgtctgtatgtgatcatatttatccatttttttcttcatggctctggtcatcttgggttgttaaaagactgccacaggccagacgcaatggctcacacctatcatcccagcactttgggaggctgaggtgggtggatgtcttgaggccaggagttgaagaccagcctggccaacatggtgaaaccccgtctctactaaaaatacaaaaattagccaggcgtggtggcgggtgcctgtaatcccatctactcgggaggctgaggcaggagaactgcttcaacccgggaggcggaggttgtagcgagccgaggtcacactaccgcactccagcctaggtgccagagcgagacttcatttcaaaaaaaaaaaaaaaagagagactgctataaagatggaactggggggacatccaatgtgaggatactcagtgcataacccagcatacccttcaaatggcagcatcttcctggagcccagacctcgctggagtccccagagtgggatggctccacgatgggccctttggacaggcacctgcaatgtccccccgagaggcctccaaccacgctccggacggccagtgggattcacacagccgctgccgtgtggggcagcctaatttgatgccaactcaaacagacagaatgaaaacacacttacgacgcctcagtctgcttgggctgccataatgaagcatgagagatcgggggcttatacaacagacacttacttcccagagctctggaggttggaagcccaacatcacgcttccagctgaggtggcctctgtggaggtctgtctttctagctagcagacggtgccttcttgccgcataagggagagggctgtggtctcttcctctccttacaaggactctaattgcagcctgggggccccaccccatgacctcatctaaacctaatcacctcctaaagcacccatcctggggcatagggcttcaatgtagaaatttatgagggcaccattctgtccagagcagatatgtatgagacaactggcaattttaaaagactagtgaacattaaactttattatccatttttaaaaataaagagatcacggtggctcacgcctgtaaccccagcacttggggaggctgaggcgggtagattaccagaggtcgagagttcaagaccagcctaaccaacatggtgaaacctcatctctactaaaaatacaaaattagctgggtgtggtggcacacaactgtaatcccatctactcgggaggctgaggcaggagaattgcttaaatctgggcagccgaggttgcagtgagccaagatggtgccattgcactccagcctgggcagcaagagcaaaactccgtctcaaacaaacaacaagaaaaaaaagaaatcaggtgctatcaagggtaggtgctgaggtataccccccacccttcccctccaggacggggctctggggtgtgggttgctgatggctcacagctgagaccctgcactcagattccgcctcccggcccagttccactgccctcgctggggcagcccccatccagcaatgggtcagggtggacacagtgaccatcagactgcccaacgcaggccatccccgaggggccatcccagctctgcagcacgctgtggggtggctgaggccttgtatacctgcagggcagtccgacctcccctctgcccaggccagggcccctccctgcccccagctgtggctcctgaaggctcctggacaccggctgcctcctgagctggggcctggagtctgtttctcagggaggccaacctcagccacgggctgatttcagtgagttcagtcgttttaggaaagcctgtcaatcctccaagggaatgcttccaatgagcttttgaagaacaaatgaaactgatttataatcagcataacaatcatcagaggtaaatggtgcctctgaagaatctgagttctccctctgcttcccccaggcatctcccactcttcattaccaggttgcaacacctaagaatgtgtaactgggcctggcgcggtggctcacgcctgtaatcccagcattttgggaggccaaggcgggaggatcatgagatctggagatcaagaccatcctggctaacacggtgaaaccccatcgctactaaaaatacaaaaaaaaaaaaattaaccgggtgtgttggcgggcgcctgtagtcccagctactcaggaggctgaggcaggagaatggcgtgaacgcgggaggcggagcttgcagtgagccgagatcgcaccgcggcactccagcctgggggacagagcgagactccgtctcttaagaaaaaaaaaaaaaagaatgtgtaactggctaagccaaggtgactccagattccagtatgaagccctctcgagaacgaggagggctgaaatcgctgacgttttgctgaatttcatgagcatgcacggcctccacgccagtaaccccgagggctcacaggcaccagagctgacgccgggtcagagccaggcacaggccaggggggtgctttcccctccaccccaggagtcagggcaggatcccatccgcctgttctgcactggcaggggctgcccccagggaaatgggaacagaggggtttcccaccccactcagttaaagcaggcagagaggagcgagccctagaccctcatccaggctcccagcacccctggaggctaacccccctaccactccccgctatgggggtcagcccaccacagatgctgcaccccgccgccctgcaggcgggccatgtgcacacacacacctgcacacacatttgcacaatgcttataaccttccacatgtattcacacatgcactcaatttcccgtctacacatgtccatacacctgttcacacacacacacatacatacacatgcgttgacacaccctcacagacacctcacatcctgtcacacacagatgcatacctgcacacccagctgcacactcatatgagcaagtcagtgctcgtggcttcctggcctttgtaaatcccgtgcgttcacgggaggtgtgacgcttaaggtatatttctcctcctttggacacttcaaattatcttgcttctacttttaaaatatgtgacatttgggagtgtttgctttccaagttccagccagtggccaagcacagcacactctggaataacaaagccaccgggagaggctgggtgtactcacccaacctcgacggcaaacaaagggcctgtggggcccagccctgcccttcccacagccgcttctgtctgtcccaggtagtaagaacccaggctgggcccggggctcagactctcccagaggaaagtgaggcccaggcccatgacctccacgtagcttcccggtcccacctgctccgggtcggaactcactctcccctcatccgagggctggaagattcggcttctcacctccagcctgggatttcctctaaaaggcccaggaaaaggtggccagccctgagtgaagacagcgctttgtatctggaaggtttgaatttgaacttgcagaccggcattcctgcttccaaatttgatttctagtggcccccgatatcctcaggctgccccgtgaaagggaggctgaccgatataagcttgtcctgcccccgaggggggcacctctgcagggaccagagatcaacaggtggctgctaatgcccgtgagagcacagcaaacccagccgcaggtgtttgcccctcgctgaaaaggtcttgctcctttaaatatgtggcaaataaaactaatctccatggaattgttggtttggtttggtttgcttttttaatgcggagttgtatttgctttgctttttgtttgttttcattttcagaaagtagctgtatgtgtttcccgtggctgccgtaacagatgaccccaaactggaggcttaaaacaacagaaattcattgtctcacagtcgcacaggccaggagtccaaaatcaaggtatcagcagggcccagctccctctggaggctccagggtggatctctcctgcctctaccagcttctagtggctcccagcgtccctggcttgtggctgcatctctccaatctctgctctgtcctcacaaggccgtcaaatctccctctccttcctgttattaaagacaccaggccgggagcggtggctcgtgcctgtaatcccagcactttgggaggctgaggtgggtggatcacctgagatcaggggttcgcgagcctggccaacatggtgaaacccaatctctactacaaaaattaaccggcgtggtggcaagcgcctgtaatcccagctacttgggaggctgaggcaggagaatcctttgaacccaggaggcggagtttgcagtgagccaagatcacaccaccatagtccagtctgggtgacaagagcgaaactccacctcaaaaataaaaaataaggctgggtgtagtggctcaggcctgtcatcccagcactttgggaggccgaggcaggtggatcacctgaggtcaggagttcgagaccagcctggccaatgtgacaaaaccccgtctctactaaaaatataaaaattagccgggtatggtggcgcatgcctgtagtcccagctactaggcaggctgaggcaggagaatctcttgaatccaggaggtagagattgcggtgaaccaaaaattgcaccattgcactccagcctgggtgacagagcaagactgtctctaaaaaaatgaataaaaaataaagacaccagtcattggatttagggtccaccctaaatccacgatgacttaaggacccaaactcattacatctggaaagagcccatttccaactgaggtctcattctgagagtctgtgtggacaaggattttgggagccactgctgaattcactacagtggccctccgtgtttgtcctggaattgcaatcgcgtacattctagcctctgcaaacccggtgccccgagagcagcagcgcctggctggcagagcctttcccgtcgatgcttcggaggtggaagcgtccaggactccccgggtgctgttctccctgcttgcaggagatgctgctcctggcctttgccagctcatcctcccacccagccagggagaggtggagtcctcactgcaacccctcctgcctccagcagccccctgcacagccacaagccccctcgcctcgcggcccctgctcctgccgcacagcctccagacctacttgtcccttgcctcgcgacagcacagtcctccacaacgctggcctcaccatgtgtcagtcccactggctagactcccactgctccataaagaccccagcctaaggggtcccagggcccagcccccagccacacacccagccccctccacaccatactcacgagcctgtgccggccccactgtctccctcctcccagggcagctacagatggccctgtgcgtacactgcaggccatcctccagccccgcgtcctctctcttagtctctgcatgtggctttccagtgcctggaggccacccgcatcccctggctgtacctgtcctctgcctcgagcactctccctctggggaagctcgggccacctgcctgcttagggtgaccctgggggctctcatggactcaaaatctcccctctccagcaatcgccccaccagctccacatccagccctgcttgtgcgatggttcccccgtgtgtttctctccccagctctgtgcaggcaatgacagggtctgtttgggggccagtctgagactgtcaggcacacagcgagtgccgaataaatgcctggtgtgtgcagggcatatgctgagcacctggcagggagggtcgcagggggtcggtgggggggaaagctgggtccatagcaggtactgacagacacttgtgaaatgaagtcaaaaaatgccaggatttccccagttccaagccaatgactgatgcctgcacttaatccatgagttacaaaacgacataattcccatatttgattcaaatagtgcaggaaaggtgttgatgaaatgaattaattttatagttaaaacatcttttcttttttttaataaaggaccatgagaaccaagagcaactgggttctggatgaactggaccagccggggaaggtcctgtccctgtgttccttagggctgactcctagcacagagccaattcaggattcccctgagggttggtggttaagcacttgcagcacagccctgcacagaagataaagttaagcaaagcgggagtggattacagtactgtttatagggagctggaggggctgctagcatgagtggattacagcgctgtttaaacaaggtaactggaggggctgctccccaccaaccctcagggagaatcctgaattggcggcatttgtaaacactcccaccaaggctgagttgaaaagagatgtgatatgacagatttttaattctaaaatcatctgaaggtaaataggtcaaatttagtgagctctgtgtcttttagctctgtatcttttattttctaatagagcttttataagacacactattttcataaaataaatgttcagctatgctgactatcaggatttatctttccttttctaggaattctcattcaaaataaatttgatgttctccttacaccctaggattctgcttggagtcaaaggcttgctgagtcattcaaacctgggggaaattcacccatactctgcacacccccatcaccatggcagcctcgcctcccacaccaaggatagagtccacctgggcaaacctattgctgtgctcactcacgcatgcagcctgccaaaagctccccctctccccgtaggagggacgcagggctcagcttcctggctatagtacagaaaagctttttaagagagtcttactctgtcgcccaggctggagtgcaatggtgcgatctcggctcacaacctccacctcccaggttcaagcgattctcctgcctcagcctcccgagttgctgggattacaggtgcacaccaccacacctggctaatttttgtattttaagtagagacggggtttcaccatgttggccaggctggtctcgaactcctgacctcaggtgatctgctcgccttagcctcccaaagtgctgggattacaggtgcgagccaccacacccggccagaaaagcattcttaacggcaaaagaaaagctcccaggagccaaggcccatccagccctcatggcctcatgcacctgccccgccactggggacctgtcccataccaggcttggggctggtgcactgccctgcctgcccagagaccctagcaccaaagccatcaacccttggcctaaggggcttccagaaaagccctggcttcacagggcttcagcaaacggcttacctgctgcaggcgggggctgggtgctgggtgtgctcctggtctgtgaacaaggaagggggtgcccagagggtctccacatcattacatggagactctggcagggggctggacacaagcccagggaagacagagggcatgggggtgggggcagagggcccacgcgaggggatgctgatgtgaacccctggctcaagagctccagaacttacccctggggggctgctccaggagctaggagaagagagatgcagggtctcagggctcacctagagagggggcacagcaggcagagaacctcaggacctgggggagggctgggaacgcgctgggaacgtgccccaggaggggaagggcgtgtaaagattgaccacttaagttcttaaataaataaaaagacaattcctttctggtcctaagaaacagctaagagctttgaactagaaaaactagaatttccaaaggccacaatggtaaaactcaagcacttgatgaaggcttagtttatgcagaattaacgatcaaaatgaaacacaagaacagagaacaaggagtgagtggaagggcccgggaacaggaacacagggcaatttcaaagtcaggtcatatcacgcaaatgcacaaaacctgaagtcaactcaaagccccatcaaagagctcagtcctaacactggatcctaggatgcagaaagcacagtcttgaagacacaacccaacagcgtggctcatgtgtcagaaacttcactaccagagaaagcacacagataggaggccaagaggggaacgttacagggtttctaagaggaaaagggtatgtcagaaatgataaaacaccacacgaatttgcccatctgttattccattcactcatctatccatccttccatatacccacccactcattcacccacccctccacccttccatccatccatttattcacccatgaatccatccacccatccattgttcatccacccacccacccagcttccatccactcacccagcttccaagcactcacccagcttccatccaaccacccatcacacatccatccatccatccgaccacccatcacacatccatccagccatccaacaacccatcatgcatcaacccacccatccaactatccaccattcatccatctatccacccatcacacatccatccatccatccatccaaccacatcacacatccatccaaccacccatcacacatccatccatccatccaaccacccatcacacatccatccatccatccaaccacccatcacacagccatccatccatccaaccacccatcatgcatcaacccacccacccaactatccatcattcatccatctatccacccttccacctactcacctgcactcagctgcccacctgtccctccacccactcatccatctaataaactgccagcgtgggccattctttaggcagtggggttataagaatgaacaaaacagatccctgccctcatggagtttccatctaggtaaaaaaatgtcagatgttcagaaaaaccaaaaatacatgaagagttatagcagatggaaaaagcagagggggaagctttgaaggggtgctggcatggaggtggaggggaggggaggggtcaagctgaagaattcaggcagggcagccatcaaagtagggtcaggaccagaaagggtgggcacagctaaggctcctcgccaagccctttccaccccatcagattccaaccaaacctgagaaagtacctccagcctccaacatacatggctcacgtgctcacacacactcacatgcacgcactcacatgctcacacacactcacatgcatgcccacaggcacacacaggggttcccaccgcagggcagtggaggcagagccccagccctttcctgttctgcaacgtgacagtcccacaccagcaaggcccccaccggagataggagctgcacagaaaagcccaggcggctgcagcctcagcaatgggtcatgcacagcagtccactgccagtcaggaccctgcctcttcccggggacttcagaacccctgtggcatgcagccccaggcagaagccaggccagcagaggcccccagccaccagggcctttgtccagcaacagagctgtgggggaggacgtgctaccaactcggccctgcaaggcaggctgacatagagatggagggacagacagggcagggccacatggcgtcccaacagctcaggtgacgctccctgaccctgggtatccccaggttcacatttggggatgagaacatgagcactttcacagcaacctcctccagaggtgagcacagtccacacatgaccttccctacaaggcaggccgcagcacctggctggtcagatgagtacacgaaggttcagagagggcagttacttgtgctgggtcacacagctgcatgggtgggagcgggagttaagcctgcatctgccttaatgtccacacagagcttgcagggacgggtccagtgaatgagtgcacctcactgccttccctggacaggtgtcccctccgaatgtccctataggagaggccgaccaggaggcgagattgcaggggcctcagcaccccattccaaacccccacagcactgctgtcaggacagaggtttcctgagcaagatcctggctagtgcctcagtttccccagctgtaataaatccatcccccaaggcagggatttctgtctctcttgggccaggagcattccccagcactaacaggctgatgtgagtgaaacagctcatttggtacggctgtgagctacgcacctgcgcaagggcgaggttactattactggtccctgttcctcctgttcctcactgccttcctgagacaggaggcaccctctgttcacccctccatgccccactccctctcctcctccccagctcccaccgggaactgctgtctgtcagcacccacgtctgcccttgggtttcacgcattgtttgactttctcacctcctggtgacttgctctgcacctggaatccctcctgagtcacacctacaggcggcccagccctgccccacctggcaaggtagccaggaaagccctcagcaggaggcccagacccccgccccacaaggagggagctgggaagggggaggccaggggagcccggcactgcagaagccgcttgtccagggctggccttctctgcgtgactgcattagtgtctctgaaacaaattcccagatgatctccagacacacccatttaaaaaaataagaaatgcattccagcagcaaagaaaaatgattcccactgatccactgctttgctgtttcttacgggagtcacctacacgctgagggctggaaaccctgccgaacctgaaggatgggtgcatgtttgaccgtcttctggtgcttgcagcagctccaagccaaaggctccagtagcatgcgggcccaggtgaccccagcctggaatcaccctcggggacacagcctttcagaagaggggctccctacaacctccttctccacaacaccgacgatggaggagagactaggaaataacccaccctgtaatgggctacacggtggcccccaaaaggaagtgtccacatagtaattcctaaaatctgggaatgttaccttatatagcaaaagaaggaattttacttatatggcaaaagtgcaattaagttaaggatcttgagatgaggcaatccgattagcaggtgggctcgatgcaatcacaacatgaattatcgtaaaatgagcgcagagggagatgagaagcaaggggaagggctggtgcacagggaggcagagcctggagccaggcagccgcaagccaaggcctgcagccaccaggcgccggggaggcaggggggctcctcctagagcctccaggaagcgcagccggccctgccaacaccttgatttcggccttccagctgcagaactgagggaaggcatgtctgttattttcagcgccccggtttgtgatcacttatcacagcagtcctaggagaacgaggcccagaacacaccgaggaaaccagccagtcagcaggaaccctcttccagggtcaatctcctgaggaagctgcaccccaaagcctcccagcatctcctggagcctacacagacctggagccacgggagataaaacactccttgtttgccagggctcttatggcaccgggaagacagcggcatgaggacccagtgtgccaaacaaacacagcgtctcctgggcccgagtggactcgggaagtcctggttgccaagactggtaggggaggggcaaccacaggactctggataccacaacacctggtccctggcactgggggtacacacagctggcacttagggggcggtcagccctgctgatcaccaggacatgagggtccctacagccccagcaccaacctgggtacagaaccccatctcgactccccctgcagggcgtttccaaccccctcaaaacaaacccagggtccttccaagccaaggcgtgggccagggacttggctctctttagaaggacgttggtggcagctcaggaggcctccaggacccaagatgaggatgagcctggtggtgggtcctacctagaggggacagggcccagccaacacttcctggtcctggagtgagggggacgcagacttcacgccgcccttggcccagcacatgccaagaagacagtgccactgtcgggcaggcggggctcccctgtgccctccaggcctcagtagttgcttttctccaggggccatggggttgggcacagcctggaaacagccttgtccagggaggatagagttgagtggggacattcaggtgggatgggtctaggtcttccacccaggggagagggcactgtgcagcctggcgccccactgagcacttggctcctgatggtagggagagggctggccctgccatgcctcggagggaggcaggttggggggcctggatgtggggccagggtctggccatgctcctgctagacatggaaagacgaccgaggaaggtgagccaggcagctgtgcacagcagggctggaagggacgtgcccggtgcgttcgttatcagcatgcagggaaaccgtgccaactacgaacagcagcatgcccgggctcagctggaatgctagcgaaaacctcactcatcacgagaaaaggctgctcagcaccccaacggttcaaattcccctggccacaccagtgcgggccaggacagacagtgcactagtgacagatcaacgtccagaaaaaatgagcacgaattcttaattcatcacttggagttgggggtcacgaactgccctcattaatacaaagtctacccccgctatgtccagccagcttcatctgataagtgtaaccccaccacacccagccctggcaggccagaggtgcgtgattaacctggcccctggcccccaggagcaggacagaggcggctttgtctgtccacaccagagaaaaggcttgaaagtgctgaccggaagcgggtgagagagcagagaacactcgcccccgaggtcgtctgggtcactactctcagggcagaggctcaattcggactctccagcagctcccagcagccctgggtccagatcgtggccggttataaacagcagagactgccagacccccaccacagcgccgatggtgggacctgctcactacgcatgccttcaacaaatatttaccgggtgtgagtggtcgagattgtttaattagggagaggagacaccaggagcagccggggttgttagcaaaataatggaccccaaaaggcgtccacatcttcatctctgaaagccaaggatgtgtgacctcaaggcctaagggactttgcagatgtgattaaggatcttgagacggggcagtcatcctgcattactgtgtggccccaaagtcatcacaaggctccttgtaagcggtgggagggtgaggggcagaaggtgctagtggtggaagcaggggtcggagtgaggtgaggaaggtgccagggactaaggaccaggtggcctccagcagctgaggaaggcagagcaggaggccctccccagggcctcccggagcagccccgcccacgcccctgaatgcagggctcctgccctccagaacagtaagaatgaatccgtgctgcgttaagcccctcgtgtgtggaaatgttacagcggccacaggagactcgtgcaggggtgagcgagcgtgcccagccctgctgtcacggagcccacactctctctgcagaagcagcatccctccagtgcacgcacagacgcccatgacccgcagccagcccggccaggcagccttgtctcccctcaacagcacagacttcgaagtcacggggaacggcgtgtgctttaaaccacagcgaggtttctattgcatgcggctcgtcttcaggccacttttctaactgtgggccagacatttctgggcagatgtttgttcctcactgactcacattccacacctagttcagctcgcccacctccaagctgtccgggtgggacgcgggaaaccctctgctcctgcgcttagcgttcgcaaaggtaaacacatcgcagaaacctgcctcccaccctggagtggcccgtggtcctcgcagacacgcgacaggcaggccagtgagaagcgccaacagccctggttcccaaactccttagctcctcagcgaaggagcacccacggctgaattgtgtccccagaaagatacgctcagttacgaactcccagtacccttgaaagtgaccttgtttggaaatagggtctttgtagaggtaatcgacttaggatgagatcattagggtgggtcctaatccagtgaccggtgtccttacaatgagatggaaacctggacagagacagacgtgcacggaagaacacagtgtgaagacggaggcggagactgcagtgatgcatccgtgagtcagataccacctggggctaccagaaactggacgaggccaggagaggccctctcctaaagccttcagaaagagcacagccctgcagggaccttggctttgaatttctggcctccagaacagtaagacaagagacttttttctctttttcttttttagacagagtctcgctctgtcgcccaggctggagtgcagtggcgccatctcggctcactgtaacctccgcctcccaggttcaagcgattctcctgcctcagtctcccaagtagctgggattacaggtgcctgccaccgcgcctggctaatttttgtgtttttagtacagacggtgtttcaccatgttggtcaggctagtcttgaactcctgacctcaggtgatccacctgcctcggcctcccaaagtgataggattacagaggttctagttttgaattcctgacctcaagtgatccgtttgcctcgcccacccaaagtgctgggatttcaggcgtgaaccactgcacttggcttgagacaacagatttctgtcgtcttcagccactcagtttgtgccgatcggttacagcagccccaggaagctcacggaagccggaggaggactgcagggtgtgaggaccgtgctgggctccagtgctggtgggctgtgcctgcacacgccgcacaggacgctaattctgtttatcaaaagccccagctttggggaaagaaattgagtggagaacaggagatatctggctacattgacccacaccctgatcccccggcaagatttttatagaaaacagttatccagaaatgaaataatgccccagctttacagctacgtaccagggacatggcaaatctcaaaacctggactctgtacaaaaagccaaatgcaaaagacttgagaagcaccaaggagagaaaaacttgaagtaatcctgaattatctgaaaagcacgttttcccaagaaaggattctgttactgctttatttgagattttaattacaggttatgtaatgagttttattttgaatgataattaacgctcaagtttaaggactaactgcgactttactaggaatacttggaagtgaagctttaatcctggaagccacagcgagcactggcccacgtgcaaccctgcgctaagcagacgtcactccgcagggtgatggcacagctcgccatgaatgaggaccttatctgaaagtgcagaacttgcaggctgggagggatgagtgcgtcagcagatcacatgaagatggaaagcccatgactctgataagagaacccaaaataggccgggcacggtggctcacgcctgtaatcccagcactttgggaggccaaggcgggcagatcacgaggtcaggagatcgagaccgtcatggttaacaaggtgacaccccgtctctactaaaaaaaaatacaaaaagttagccaggcgtggtggtgggcacctgtagtcccagctactcgggaggctgaggcaggagaatggcgtgaacctgggaggcagagcttgcagtgagccgagattgtgccgctgcacttcagcctgggcgacagagcgagactctgtctaaaaaaaaaaaaaaaaaaaaaaaaaagagaacccaaaataaaactcacagctggagtgacgtacacattttacaacagaatcgcagaagggctagaatttatttttaagattttcccatgagcacacaggtgattatgtttttacaccagaagtttctctgtccttgaacctacacagattgtccttggccccaggaggccctcgcagggacagttggggaccatgacctggggcggggggtggggggctcatacaggacaattgctattgtcccagcctagggagttggtacaaagctcaaagccagcagcactgaagcgctcccaagtggctactcacctactcggttcctgattcccaaaccaagctaaggccccagctagggagcacccgacactcccgaagtccacgtggcgtggacgtacagggcccacagcactttgggaggccgaggcgggaggatcagaaggtcaggagttcgagaacagcttggccaacatggtaaaaccctgtctctactaaaaacacaaaaattaaccaagagtggtggtgcatgcctgtaatcccagctactcgggaggctgaggccggagaattacttgaactcaggaggcagaggctgcagtgagccaaggttgtgccactgcactccagcccgggcaacagagcaagactcatctcgggggcggggaaaaagattattctcgcagcccctggggtcctaaaagcaggtgatcaagaataaactcaaccctaacaaagcagccccggcccactggcgcacacaggaggggcacccaggtctgcctctacccagacatgaggtgagtgaaagtgacttgttgccgtccccctccaagatgttcagccttgcagaaaaacccgcctttcctgtgatatcagagctgccactcaggaatgcgccccatgggaagacgaagacgctaccgtgatgacaaatcacccgctcacagcgcggacagagatgaggaaggcttcccgggaatgcccagaggcctggagcccacactcccgctcacagctgtgatgagcacgagggcggacccacatgggagcttagccagtgctcacaggggcaggacagagtcagacatacctcggcgtcccctaggaaggggcagaggagacagggaagggaagtgtacgtgattggagggtccggttcctcctagctcagcaccagaggcagcacaggcagcactctgaccacaacacagaatgagtttcaggccccgagggcattatctctggcctacgtggaggggcgggatggccagcccttgtctcatttgcacacggtgcctgctgcagacccgcgggcatgttctgttgggcggaggacgctgctgtctgcatctagtgcagagggaggaaggtgacaatgacaagcaaacaccaccatgggggtgagggctgcagggaggacagaggagtggggacagggagggaacattcagggaagacctgggggaaggtgcgctggaggggcaagcaccacggtgagagaggccagtgtgtgtcccgaaggccagagtgacctcagcctggggagccgggggtgaggctagacctctgagtgccacaggcccagtgactgcactttatactggagcaccggtcaccccaggaaggcctgaacactgatgtgacaaatgcctgcttcaccaggcatcctgggcgctccgtgaagaagggatcgtcagggcaggacgagggtggcagggagggcaggagaaggccccaccaaggtgataacatgaaaacagggacaggcagcagagagaagaactgggctggggaggcagcgtcattaggtcatggcaagaggctgaacgtggggccaaggggcatccactgtgagcccgtgggctgaaataagggatggggagaggaagcaggatcagagcagggagtatctggagttggtactggggacaccctccaggggaccagagggaagaggctggaggcccggggcatctgaccctcccaggagcagctgtgagactcacctctcacaagagatccccaagtcgaatcctggccccgcccgcctggtgctgcacctgggtgttgacagaactgggatgacaactgtcccacctcctgggttgtcacagatacatgggaaaggccgagtgagagcagagcccaggacttccgttcttggtcaccagtagagagtactgttcccagtttaggtttttttttgtttgtgtttttgtttttgagacagtctcactctgtcgcccaggctggagtgcactggcatgatctcgggtcactgcaacttccgcctcctgggttcaagcgattctcctgcttcagcctcccaagtagctgggactacaggcgtgtgccaccacacctggttttttgtatttttagtagagacaaggtttcaccgtgttggccaggatggtctcaatctcctgacctcgtgatccacgtgcctcggcctcccaaagtgctgggattacagatgtgagccaccgtgcccagccggttcccattttagtaatgagtgagtggtcgtaattgtttaattagggagagcagacaccaagagcagcaccaggattcaaaaccgagtcctaaggccagtcctgatttaatgaggtcaggtttcttgtggggaaggaacagcggcctcccagcccctcaggtgtgaggttaacagctgcaaagcccctccggggccactgcataccacccatcacactgcccctttcaaccagcacagaaggcgcctttcacaaaatgctgttaaacaaatgatgcaagaggaaggatctaagctggtaaacctggccggccgttgaccctcgagggtctacagctgcagctcagaagccagaatgcctgggtttgaatcctgaccccaccctccacagtgccagcagggtccttgccctcagcgctgaggccgcttctctgccgtggggcggccctgtgcactacagatgtcaagcagcattcctggcctcaacccaccagcacccccacccccagctgtgacaaccaaaaatgtctgattttgtcaaatgtccctgggggcaaaatcacccctagtggagaaccactgggctagatgctttgatgtcttgtacctcagtttctatgaccccattataaaatgggatcatagagctgcctcgagaagtcaatgagaaaatacgtgtagaatcatctagagcagtaaccagcagagcagagcaccactaaacattagctacaatccggccaggcgtagtggctcacgcctgtaaacccaacactttgggaggccaaggcaggcgaatcacctgaggtcaggagtttgagaccagcctggccaatatagcgaaacccagtctctactaaaaatacaaaaaattagccgggcgtggtgatgcatgcctgtagtcccagctacccaggaggcagaggttgcggtgagctgagatcacaccactgaactccagcctgggtgacacagtgagactcagtctcaaaacacacacacacacacacacacacacacacacacacacccattagctacagtccctgccatcctgggggacagagacatggaagtgtgtgaaccacacccagcatgggggtggaccaacaaaagcatcagcaaggcacccaggaagcttcaagggaggaaacctatgatccatctgaggaggtcgggaaacttccagaaccttctcagagcaggtgtacagctgcggaagcagattttgagggaggcccatgatgggcagatggatggggaggagacacatttcagatgaagggatggcaggtgcagaggggagacggaacagggccctgtgtctggacccacaggagccaagtcagagcctgagcaatttaacaacaaacacaactacgatgtttacaaaaagaccgaggggctgagaaccgaggaacaccagcccgtgtttgcctctcagggttgtttaggactctctgcagagcggagaaactgggaggccatcccaggcacatctaagatgccggagccttaaggcttcctgccctcgtccctttcggagaatgggatggctgcagaccccaaccacagtcccaacgccgtgagcgggtggcagccctcctttccctgcaaagatcaggggaatccacagaccctggggccttggacttctctaaggccaaaatggatttcagggacacgggagagccatcagtattttctccagcatcaaatttgttgagcttttcctgaaattaattgctacttccttcatccagctcctgctgtctcctgtcccgcaacacaagaagccaggggctttcagcagccacttgggccgattccaaccttgcaaccgtgaggcccccgagctcggcttaccagggagcaagtaataaaacccctctgccgacagcaccactttcatcgtgaataaatgagctcaattacctccacgcagaaaaaggagcgcttcaaagggaaagagggaaaaggggaggaagagggacggagtagaaataatcagtcttaattagccttatctccgagggaaatacatatgataattttggtacccaaagagattcaaattagtctcatgccaatcattacatgttagtgggtcttactggtgatgacagacttggccgttccccagtcattagttttctaaaaatgactctcccgatgaaaagaaaacctgagaagctcagaaggtgggttccccccaatgggtcaatcatcttcagaggggatctgctggcccaggggtccccaggggcctcgaccacccctgcccagtgcagccccaagcttcctgcagcctggactggcggcctggaaggccgatgcaggtctcaaagccacgttagacgttaccctagggctcctgactcatctgacaaagccagaggtggtgggtgcttgcacagtcccctctacccatgaaaaagccaacggcacagatgaacttggtcaccccccagaacaggctgggggaggtctggctgtgtgcgctggcctggtatacagtaggtactatctgcggagtaaagatggcgtccttgccaactcttgggagcgtaacaggcccctttccagggacccgcggccacggcttcttcatctgaagcagggaagtcgacgaagcgccccccacccaggccacatggcaggcactggctcggggaaggggcgctgaccgtgctggccactgctacatccaagctggcccttcagagaggcagagcagcccactcaaggccgtgaggggcaaaggggaggaaggggacctggggaagctgacacagaacaggaatccactgaaagagcagaggagggggcctggttcaggcctgctcatacctggagtcgtccccacccccaaacccaacgcaggtgtgggctgtgggaggcgggggtctcccgccgcctctgcctgcctgcctgccttgcccacagccgagccccggtatagccaggaatttaggattagcattcagtgagagacagcggggggaagagccccagacccagacggcaccaacagacagccacagactagcaggcgtgggaacaccacggggcaggtgaccacactgccttccttccacctgccatatgaccagagggccaccaacctggagcgcaggaagtcagagccgggagcacccttgcatcaggctgccaacacccgtgctggtggttttccctccacttctgatgcagagaaccttggaagccatccttcctctctctctctgctcccctgcgctcttcctgcctgataaatacctgctaatacctcaaacccttgttataagctcgataaacttgtgctatgtgctggtaacgagcagctaacgattgctcaggtgtttatattaaacagattaatcgaggacacagtcgatggaagagtctcaaagttatctccggtatgaaccaaatcctgcctaatcccagagagctttcaaaaaaaaaaaaaaaaagacagactattcaccactgggaccattgtaaactcgcttatcaaatgagccgtcattttgtggaacagccaatcaaagaccaaagcaagatgtgcgctgagatgcagagaatgtgtgtttctgtaccgctctcggggtggctctttatttttaaaaaccaccgttggctacatttggagtaattcatcttggtgatgagtcaggaggtatcaaggaaagagcatcttcagaggcgggaggatgagtcacgaaatttctacggtgacagggaggcatgaaaaaacaggatttcaagacccaaatgattaatggctcaatggtttccacctggttccactgttttacgctaaccaattaagcctgcaatctggaataaagtactttcacctgagggccacttaaaagcaactcatgtcatttcatgcgtttaggttttcttttaagtggatctcaccctgtaaccttgtcctactgttctcctaaagcaggcagttaagtcgggcagggaaagtgagtaagccgtgggctacggtcagggaagccccgagctggctaagaaagtgccattgctggccggacacggtggctcacgcctgtaatccctgctctctgggaggctgaggcgggtggatcacttgaagtcaggagatcaagaccagcctgaccaacatggcgaaaccccatctctactaaaaatacaaaaattagctgggcgtggtggcctgtgcctgcaaccccagctactcgggaggctgaggcagaggaatcgcttgaaccgaggaggcggaggttgtagtgagcgaagattacgccactgcactcaagcctggacaatagagtgagatcatctcaaaaaagttaaaaaaaaaaaaaaaagtaccgttactgagatcatctcaaggttcgtggagcccacacctgggcccagcgcccatcctccagctgttttccccggagggaagtaaacagaggaaaccacctgagaccctcggccatgtgacctggggacatgtacacaaagccagggtgagcccgggcacctaccagtgaagtcctcgaagcactcgcaggtgtagccgccctcgcggctgcggcagcggccgttggcgccgcacgggtcggagtagcagaggtcgatctccgtctcgcagtagtcgccggtgaagccgggcgggcagcggcagcgcaggccgttgatggggtggatgggccggaagagcacggtggtggagctgaggaagggcgcggagctgtcgaatcgcagaacggacacgcacttcatgtagttctcgcagggctcgcgcaggcagatgttgtcgtcgaagggcagcacgcgctgcgtggagatggtggtcagcagcgtccgattcaggtagatctgctcctgcaggtcctccgacgggaagaactggccgcggacgccgccaggcagcagcgccgagaaggtcacgttcaggatgttggagctgacgtcggtgtcgttctggacgttgaagacgaagacgtcgtccttggtggtggacagcacggcggccaccccctccacgaagagggccagcagcggggacaggaacttctcctgggacatgttctccaggcggacagtgatgctgttggtcagcatgtcgtccgtgatgatggtgacacgcagggtgcagaaggccgtgacgctgtggatgccatctgcagacacaaggaaagtcagggtcattcagatgctgcgggagtcacaggtcctataggccccatcccaggagcagcctcaggcatgcttggcaaaggagaagagagcctgggcatccccactccccattccccacccatgaccaccaccttgacccttcctccttcagcaccctggcccctgccccccatgaccaccaccttgaccctccctcctccggcaccctaacccctgccctggcttcctaaagcacagctccgatcacatctttctctggctccgaatccctcagagggccccaaggtgctcagcagggcaccctgacgaccaccaggattcagcccctcactgcctgaaactcctcacacgctttggttccagccacatgaggacttgaagcccccttctacctcctctgcacctgccctggcctccagggatcccaccctgcccaacctcccaacagttcttcctgtcctcgcagctcagctcaaactctgcagtgcctggcaagcccgccctggtcctgcccaggcgacatccccaccgacgtgctgtgctgagggtcccacttagctcggctgtaccccacgcaactccacatgcccagcacacaggaggggccgaggagcaccgctttacaaagacacacagcagcctctcagccagcagtaaacacatcatcaagtgaggtacttaggagtctgaggccaagacggtggagcaccttggttgcaaagtcgcatgcatcatcggttccaggcccagaattggatgagacgttcagggggtgggtcatgggtaccagtggctcccagggacggagcagcggcccctgcccaggggccctcacctgccacctccaggcccgggctcagatgtggggtgggatttgcagaatagcctgccaagtccaggtcctccaggcctggctcggattctgtgttccaggagcccccaccccatcccaccccatgaggccccctgcccatggcccccacaagagctcccaccctggtttccatggagcgtggggcccctgtcacccctcagagtcctgggcctcagtaactgccccagtcaggaggacaggagctgggcagggagccagagagggccaggccctcctccctctcattctggggactgtgaggaagtgtctgggcctttggagggtgatgaggcccagaggccaccttgtcaccccgagcccggcaacacacccgacaaggcacagcggcacgcggggatcccaagaggaaacggaacaagagcagcaggtggctccgcacccggcgctttcccagcaccaggagccaccagtcacatctgggagggacctggagtcaggtaatttgtctaaacaacaaagaaatgcaaccactgcagaagccacagatgcgtgcaggtgcagtggacccaagatcccaagagattctaacagaaccagcaccacccccagttcacaggtgaggaaaacggaggcagaagccaaatttcacacccagaaacgcaggcccggctggggatgcccagctcccaccccagtaacgacactcgggtcatgccctgggtgctgttgctctgccaggtggccttcaggacagcgtggcaagtcaggactcagaacatgaaattaatatttgtacaacctcggtgtggggagggcgcctctggctctggcataaacccagagcccttcgaggctactcagttctgtgggcaactcccacagagcacctcggagcaggaaggagcagcccagagggcgtccgcagagcccagaggcagaggaccagtggctctaaggagaagaagaggtggggaaaacaaatgaggccaaaaggcctgaggcaaaggacatggtgggagacggcctcagagagtgcgttccttccctccccgaccccagctgctcccactccgaagggggcctccactgccctgccctgccctggagcagggtggccctgagacggctgggtcccacaggatgtagcaggaaacacgtcctccagttcctggcccaggccccaagagggctggaaggttctgcctctttcttcctggtgcccagaacccacactagagagggcacatcgggaagaaggcagcactcccgtccagggccccggccaatggaagccccagaccccagatgtgacccaccgggctgctgagactcaagccaccccagggaggacccggacaccacagagcagagaccagccccacactgagcctggccacactgtgagtagataatacgaccagagttggaggccactgggtttgggacgctttgttacacagcaccagacaaccaaaaccaatacagtcgactcatagaccaaccgttcatcaacttaaaacattaaacctcactgcccggcatataagatattaatgtgttgctgggaaccgaactgtgtctcctcaaaattctaacccaaggggatgggttttggagatgaggcctctgggaggtaatgtgggtcaatgatgaggtgacgagggtggggccccaccaggggatttgcatcctcacaggaagagacagcagagagctctcctctcctccgcatcaggacgcagcaagaaggcactgtctaccagccaggaaaacaaagcctccaggaacctggccgtgctgcctccctgatcttggacttgcagcctcaagaactgtaagaaaacaagtgtttgttgtttaagccacccattctgtggtatttttaaatggcagccctagcagactgacatatattaattcaattaaaataaattaacatgctaaacaatgtgttaaaaatgtgaacgtaagttaacatagttttgtcttacgcaatgctcataaataactttaatttgctacatcccgtttatacattcctttgccaaaaataaattgtaaacattcagcgaccctaagcttgagcaatcatccttctggaagcccaaacacacacaccaaagacaaagaaaccacctaaaggtccatcagctgggaaatgcacaacccaattagagaagccacacaatggactactacgctgtcatgaacataagtgtgtccaaaatatgcgcaaataaaatgaaagggacacgcacagtgtgatcccattttgtgagggggctgctttacttatgcacgaacatgttatatatatatatatatagaaaactctggaaggagccgggcgtggtggctcactcctgtaatcccagcactttgggaggctgaggcgggcagatcacaagttcaggagatcgagatcatcctggctaacatggtgaaaccccgtctctactaacaatacaaaaaattagccaggcatggtggcaggcgcctgtagtcccagctactcaggaggctgaggcaggagaatggcatgaacctgggaggcagagcttgcagtgagccgagatcacgccactgcactccagcctgggcgacagagtgagactccatctcaaaaaaaagaaaaagaaaactctggaaggatgctgcagcgactcctacaaaggatgtaaaaggatggggtggcagggagtgaaccacctttctactttactgctcattttgtgttactcagctgtcttacgattagcatgtaccgtttgggttgctactttttgtaacaaaagaaaaagatgagtcaaccacacctatgttcatagcagcgctattcacaagagctgaaacatggaagtgacctgcgtccaccgacagattaacggattaaaacaatgtggtctggccaggtgtggtggcttacacctgtaatcacagcactttgggaggccgaggtgggtggatcacgacgtcaggagttcaagaccagcctgggcgacctggtgaaaccatgtctctactaaaaatacaaaaattagctgggcgtggtggtgcatgcctgtaatcttagctactcgggaggctgaggcaggagaatcgcttgaacccaagaggtggaggttgtggtgagccaagatcataccactgcactccagcctgggcaacaaagcaagactctgtctcaaaaaaaaaaaaaaatgtggtccatgcatactatggaatattatccagccttaaaaagggaggaaattctgacacacgctacaacatggatgtaccttgaggacgtgatgctcactgcaataagccggtcacatgtgaggctgcacttacaggaggtccctagaggagttcgattcatagaggcagaaagtagaatgatgggtgccacgggtggggaggcagattggggagctgttgtttagtgggtgtggggtttcagtttggggccatgaaaaagttctggagatagatggtggtgatggctgcacagcaaagctaatgtgcttaatgccacagaaccacacacttaaaaatggttaaagtggtaaacgtatgtgtattttaccacaattacaaatttttttaataggccagtctcagtggctcacgtctgaaatcccagcactttgggaggccgaggcggcagatcacctgaggtcaggagttcgagaccagcatggccaacatggtgaaaccctgtctctactaaaaatacaaaaagctagttgggcgtggtggcacgtgcctgtagtctcagctactcggaaggctgaggcttgagaatcgcttgaacctgggaggcagaggttgcagtgagccaagattgcgccactgcactccagcctgggggacagagagaggctctgtctccccttaaaaatgaaaaatcttaaaaatagcctatgacccacaggcattgcttggccatgtgctgaacacccctggggtctgccagcctcagtttccctccaccatcatcctcatgtggcagccagagaggtcttcctaaaatattgacctcatcaccttgctcccctgtggtccctaatggcacccagcataaaatacacacccctctgtcctgtggtctgcgtgatctgtccctgtcatcgtgtgaccgctcttcctgccccggggcctttgcgcatctcctggctggagcactgccctccttctcagacactggctacacccctgggtccctcgatggaggaccttccatgctgagcccctcactcccatctgccacatcccaacttcagttcttgtacaagagtggcagggctctctgtgtttgttttgttgttgtttgtttgtttgtttgttttgagatggagtctcgctctgttgcccaggctggaatgcaatgatgcaatctcagctcaccgcaacctccacctcccaaattcaagtgattctcctgcctcagtctcccaagtagctgggattacagacgtacaccaccacgcctggctaatttttgtatttttagtagacgaggtttcaccacgtaggccaggctggtctcgaactcctgacctcaagtgatccacccaccttggcctcccaaagtactgagattacaagcgtgaaccaccgcacccggcctagggctctgattttcttatttgtttatatttgtttctttccccatgagtccctgaggacccagaacctgtaggtcttgttcctgctgcatccgtcacatctagaacagctcctggcactcagaagccactggataaacatttgtggaagaaagggagggagggaggaggaggggagggagggagggagaggcaaaggggccagagaagtatggtgtcactttaactccaacatcaacattgacacaaacagcataatgagacttcattttttcatgtgagctatttttttgtgcctgtttgacttttttttttttagggtccactacaataatacagatagggtactgtttacttcctcgtggcagttgttatgaaacatgcttttatcttaaaccacacatggatgtgtttgttctggcccaatacgcaaaggccacactgattttaaccaggaaaataagcaggtacttgaaaaattgattaatgtttgggtctgagcttatgtatcatagtgagaagcccaggccttcttggggtgccctgagctactctgacccccacaagttgggaggaggctccagcactggggccttcctgggggcagcccaggaaggcacagcacagagaaacaccccggaacaaggacccatattctagggacatccatcttcactcagggataaaacgatgacataacagacagaaaatagcattaaatattaacgactgtgaagtgtgctacagaacacgatgagtgccttactgttaatcctaacatcaatctccttcgagaccacgggccacggtgaaattactttttacttaagtagtctgggttggattttgaaccaacctgcagcttaagccttcagatacacacatctaaacgccaccagtatgggaatgctgagccaagcacagcctatccccacaacggaatatgacgcagctaaaccacacagtagcacaaacctccatttctggcagagatagatcaagacaacatgatgttaggttacaagaaacaggccaggagcagtggctcacacctgtaatcccagcactttgggaggccgaggtgggcggatcaccagaggtcaggagttcgagactagcctggcgaacgtggcaaaaccctgtctctactaaaaatacaaagattagcagggcgttgtggtgcacatctgtaatcctagctacttgggagactgaggcaggagaatcgcttgaacctgggagtcggaggttgcagtgagccaagatggcaccactgcactccagcctgggcgacagagtgagactccacctcaaaaaaacaacaacaaaaaaggaaggagttactctttcacacaaaacaaaacaaaaaaaatgtttctacatgagcccagagagctatcggcactgtggacagtggttctgtctgcattgctgattttgttttttgtttgtttttataaaacttaattttgaaacagttttagatttacaaaaaaattactaatacagcgggttcccagagaccccacacccaggcccctattagttacgttattacattagcatggtaggtttgggggtcttttgcttgttttgagacagagtctcattctgtggcccaggctggaatgcagtggtgtgattactgcagccttgagctttgagctcctgggctcaagtgatcctcctgcctcagcctcctgagaagctaggactacaggagcatgccaccatgcctggctgggttttctgttcttgttttttgtagaggtgaggccgtgcgatgttgcccaggctggtctcacactcctggcctcaagcgatcctcccacctcagcctcccaaagtgctgggattcacgggtgtgagccgctgcccctggcctcagcatttgtcataatgaaggagccagtattgataggttattaactgaagcctgttctctctgcagatttccctcatttccacccactgtcctctcctgtcccaggaccccacaccacactcagctcccctgcaccgtggtggcttccagccttccctgggtctgggacctgtacagttttcaggggctgcggtctgtggccttcaggtgatgacgactttctgcctcacgctgtcccccgtggtttcatttctgtgtgtgagtacaggtcagttcacagtttggggtctgcttgattccgggaggcacggcacccacccagcactctctctgcccgtgctccaggcattcctcccaggcctggagcggctccgcggcacctcaaaagcgatcaagtgccatcccctgctttcccgggaagggtgagtcacctcattgtggctgagacatgggaaggagacagagcagacggcagagcgcgaggctgcggggccctcctggcaggtgctgtacaaacgtgaaccacatcatgggaaggaactttctgggtcttcatggaggttgggacctgtccagtccccgactttcgtgaaagactctgcagtaagataaaggttatctgcaattgtgttccccatggtgggctcatgctgtggggcagtgggggcagaggtcacatcatggccctcaaggagcaggcagccctcaggggacaggggacagtgccgcagttccgagactcggtggcaggtgattggcggctgtgggtgaagagcagcgcagctgatgctggacggccccgggagacaggggagtaggtttcctgggaagaatggagtttgccacacaaagtgaaggggacaggcctcctgagagcacaacgcatgaaaagcagcaaaaccagcaaggcatggggacgggtggcatcagctcccggggccgtcggagcaaagggccgccgctgcatcaccaatacaggacattcactctctccgttttggaggccagggatctgaaattcaggtgttggcggggtttgttcctcctggaggctcaggggagggtctgttccgggcccctttccctgggggctgggggtccagcagtccttggcgttgcttggctcctaggtgcacccctctggcctctgcctctgcgccaagtggctatggctctccctgtgtcgtcacggctctgtcttctgttcaccgcaccggaagccagtacagcctcatgtcaacacctcaattacagctgcaaagagcctatttccaaataacatcccactctgaggttccaggtggatgtgaattttggggggacgttagtcaaccccgggaatgcagagtagcggagagacacgggcacggaggcagggggtgggtgaacctccgactgctgccggcctcgtgggctctcggtgcaggacggcgggggtggctgaaggagaaatgtccgcagaggggtggacaggacccacgcaccacgaggaaccatcgctggcccttgacaggtgaggacaccaaggcacaaagaagctgaatgtgcctggtaaggtgactcgggctgagtggcggggcccagattaacctgaggccaagtccccagtgatggtggatgggagggacagaggagatggtccaagaggaccctagtcctggcatgggagggtctgctgaggacatggaggaggaaaggccagtttgtgacccacctggggccttggagatgacccagtgagatggagccacaggcagctggagacgcagccagtgccgggcaggaaccaggggccacttattcactgtgagtctccgtcaccaccccatgcaccaaagcctggggggctcctccactctcccgtcaccaacgcccctcgaggcctggttagggcagcccatgatgccctcggggtccagagtcattccccgtggccggctgtgatcacatccacagagcgttgcttgctgtccagctggtaagagacacagggtgcgtgcctgtccttcccgaggccttcacagcaggcagggagggccctgcttggtggctcctggtggctcccattcaaagccagggaactttgaagtggctgtgtgcgtctctctctcttctgggtttgttttgttttgttttagaggccagattggggccagacaacaggtgcgatgtgttgatcctgctacctgagggcgtgtggcttttctcctttctgggcaacaatctaggacctgcgtctcacgaatgcaggttcacgtcacaggaacaaggggacaagcactttcagggttgggtgtgcggcgcatgtcaggatgtcaagccacgagaggaagagtgagcctcggacccaggagagcagagtctcatcccagcacgagcgtctccagcaagccggactgtagaaaggcccacgtgctgctcacgatgcctcgggaacaaagtcctgtgttaaccttgcagtcaaggtaaagggcgcagctctgcccgggggcagggctggggagagcagagccagcctcctagtcctccttgtccccatctgtgccactggctggacaatggagaaggaggagccctcctgacacccccaggaagcccacatcttggtttccctggtttctcctctttggaatccaagtccacactctgtaaccccaccactgccatcccctcgggctgctgcaggtgggtcctcacacatcctcccgttggtcccacctagtcttagcctcagacaagcacccccggcggccagcacccaccccaaccctgccccagtgtctggtcccgatgcctggtcctgacccctagacattgtgtaaaactcaaataagtgtatttaatatatccattacttgtaaatttatcatttatttgtggtaagaatgttcaaaatcctttcctctagctattttgaaatatacaatacaatattattaaccatagtcatcctattgtacaatagagcaacagaacttattcctgccatcctactgtaactttgtactctttgaccaatctctccccaaccccctcttcctccttcctcacctccccagattctggtgaccattattctactctctacttcttttttttttttttttttgagacggagtctcactctgtcatccaccctgaactcaagctgcaggtcccaggcaggtcacttaacttgttggagaggctgccgggatctgctaagaacagcaagccgcttctcccatggccaagcacaaatcaaatggaaacgcacaggcaggccctgggaagcccatcaacaggcaaatgaggagcgtgttaaaagctctgaaaagcttctagagcttcaaatcattcaaacacaaatgccattttatcttgccgcattattctgtttcaaaggcacacttattcacttaacatccttcctcgtctcctaaattataaaatcctagaaatgacaagaattattctgtcacaagatatggaggagagcacgaaagaaccacatccccaggccctcagcattagatgagtcaggataaacattacacattattattactgaaaaaaacccaacttcaggtagcacaagaaataaggaggccttaaaaacgacagacaccctgacacacgctacaacacagatgagccttgaagacatcacactgagtgaaagaggccggtcacaaaaggacaaatactgtctgcttctgcttacgagaggtcccgagaacagtcaaatccacagagacagaaagtaggatggtgagtgccagggactaggggagggctgtggggaggtggcattgaattggcacagagtctagtttgggaagatgaggaagttctggaggtggatggtggtgacgcccatgaaacaatgtgaatgcatttaatgccactgaactgcacacttaaaaatggccaagatggttcgttttataaagtttattgcaattaaaaataaagaaacgaatggggggggaagaaacaaggagaaatgaagctacgaagatatctaaaacctccttctcaatgtcactcccacatttattatttatggtaaaatcacataatcttcgataacacttattaagaaatgttctctcctgatttcatgtacaaaataaagctcatatcctaaggcagaagttagaatctaattcaggatttaatactattaagttgttccatgttattccaacacagctcatcatgtctctgcttgatggaaccttctggaagcctgaaataataacaggccccactgtgccccaggaaggtgtgttcacacatcaacatagccagcccaacgccagcctaaagaagttgtgggctgagacgttgagcaagtgcattcttgtcaggaggcagaactttcatttaagagttaaggattgcttcctcacaaagctcaacatagaattaacacatgacccagaattctatccctaggtgcaatgcaaaaaaattgaaaacatacatccacacaacttgtccacaaatgctcaccacagcattattcacaataacccaaagtggaaacccaaacgtccaccaatgtatgaatggacaaacccagtatgttccattcatacaatggaatattattcagccataaagaggaagtaggctgggcgcggtggctcatgcctgtaatcccagcattttgagagaccaaggtgggtggattgcctgagctcaggagttcgagaccagcctgggcaacatggtgaaaccccatctctaccaaaatataaaaaattagccaggcgtggtggtgcacacctgtggtcccagctactcaggaggctgaggtgggagaatcgcttgaacctgggaggcagaggttgcagtaaactgagatggtgccacttcactccagcgtgggcaacagagtaagactccgtctcaaaaaaaaaaaaaaaaaagaggaagtactgaccaggctacaacgtgcatgaaactcacaaactttccgccaagtgaaagaagccagacacgaaaggccacataatcatgatttcattgatatgaaacacccagaatccacagagacagaagccatgctggttgccaagcgcaaggggcaagagggaccagaagtgattaagcttactgggtatggggctttctcaggtgatgagaatgttctagaactgcacagaaggagaggttgcacatcgtgaatgtaacaaatgccactgaagtgttcattttaaagtggtaattttatcgtatgtgagtttcacctcaatttttttaaaaggcaaaaagagttaagaattgattcttagtaaaaatttgtcttattttggcgtgacattgtacaaaaggagaaagcgattctaaagggcatttcaagaaccatttccttcaaaccaagctgtcgaatgaagtcagaaatgaacaggtttctaagacgtggaactacttctccttccaagagcaggaagccaccttccgaccctggagacaccaaactcccccaccttaaagatgctgagtatggcttgggtagagccaaagtcgccatctgtttataccatgagctaaatatcatgggagaagcccacacaggcccacccgccacagtgaaggcaccagccgggacttcgacagggatcaaacacctggagtttatcaggaaccttctgttgtctctgctttgcttcaagtcctcacagaacaatctgaaggcattcgtttcctgaacaggaatccaaacgtctgaccacaagaaaccccttgttggggagtgccgggaactcctgtggggagacgctgagtggccaacgagcctgtttttttgttttgttttgttttattggcttttttttttttttgagacggagtcttgctctgtcaccaggctggagtgcagtggcacaatcggctcactgcaacctccacctcccgagttcaagcgatttccctgcctcagcctcccaagtagctggggctacagacgtgggccaccacgccaggctaattttttgtattttagtagagacagggtttcaccatgttggccaggatggtctcgatctcctgacctcatgatccacccgcctcagcctcccaaagtgctgggattacagccttgagccacggcacctggccaatgctgttttaagataagaagaaaaaggaggaacccccgggcttcagcttccaggacaggtaccccatggcagcactgtggactctcgtgggggctgggtaactctctgtggggtgccagcccccgggaggatgctgggcagcacccctggcctccacccactggatgtcagcagcacccccaccccaggctatgatgaccacacatgtctccagacaacacctgccagggcagcagcacaccagctgaaaacccagccctcggaaatgatcacccaaacctctggaccccttccggcctgagactctcagcaggtaccaggagcccgggaagcaccgagctcagggctccttggctcagcacccggctttgccagaccactcgggcctctgcgcctcccgacagcgccgtctggggcattcccctgccagctgagcccagagattgacacgggctgggccaaaggggagccattccagcctcgctcttccctgccagaaccagaaagccacctctctgccctcgtcctggaaaaatgggccaaattccccaaggcaaagattaaacgacaaaacaaatttcaaagaacaagtgggcacctggttctgagccaaatgatgccttccagcatgacaatgcggccctgagcacctgccaagggacaaccatatgttccctggcccgacgtgtccacgagccactgccagcccaagagagctgtggacaataaagatgagaatttttttttttttttgagatggagtctcacactgtcgcccagtctaaagtgcagtggtgcgatctcggctcactgcaacctctgcctcccgggttcaagcgattctcctgcctcagcctcccaagtagctgggattacaggtgcgtgccaccatgcccagctaaaatttttttttttttggtatttttagtagagacggggtttcaccatgttagccaggctggtctcgaactcctgaccttgtgatctgtccgcctcggcctcccaaagcgctgggattacaggtgtgagccaccgtgcccagccgaagatgagacgtcttagtaaacacagcaacgagcccaacccagccctgcagcaggtcctgctcagagctctcaggctcttcagccactgctcaccgcaggcccagggagtcaggaacgaccagggccagtctggaacattccaggctccaggtctaaaagtgctatccagcacccagccaggctcctcatccagccacctcaatggccagagcagcaggtgaccctcggcctccctctgcgtgcccctgtgccactatctccatcttcctcttctccttgcccggagtctcgcatgctcacacctgcggctggtgcagcatccgccgacggacgctcccggggttttgctgaatcctgggagcttctctccctccaaaatgacctgctggactcaggtctgtcccgacccccatgcttgtcagcagtgcctctgaaatgctgactcatctccagggaccaacctgcgtcaagccgctcctacccccgagcccgaaggccctcctgtgcagaaaggctgcggcagctgccaggggaaaactgtctgggccctgccctggaagcccctaccactccaggtgagcctcaagcagatgcctcgtctttgggaaaaagctacccacggtggctgaaccggcactgcagccatgtcccccacaagctcatcacggagccagagaccacagctgcctctgggcaggagatgctgggttccaggggccagggatagtgagctgagactttttgtggttatttggactttttgggggggggccgggggtgggtagaaaattaaaccttatttatttttaaaaccaaaccactaggaaaatatatcacagccgggaagcagcaaatggacaggctgtcttatcatttcaagtaataagctggtgagaatacaatgaggttgctatcaaaacaataaggtgccatgccggagcaggaacactgcaagctgcgaaagccccaggcagaaatggtatttggtaacgggggctgcctctccttcactctcagggagtcagctcatcctagcccaagttgcttccttttcctcccttgaatttcctgttgccaggggtttgtctcgactggactctgttaattcaggggctaagtaggcaatgctcggtttaggtcttcattccatctgttctacaaaaaccaggtttttccaaatccagtacttcataactctgttataatcaagtagccaaatgctcctcttctactgttcactcctatatactagtatgtatcacaatcaaaatccccttctcttcacgggcaaagtgttactgcaagattgtcctgtcgttttgctacacacagcctcaaggcccatcagccagtaattctgcttcccacaattagtgtgtcgtcgcctgtcatgtttttgcatggtctccaagctgtggtagacgaaataatgtctccccctcacctcccaagaagaggtccatgtctcaagatgcagcatgtcaaaattttaagaaaagtacatccacatcctgatgaccagaaatggggatcctttcaaagttcttatccaaatgataaggaacctttcaaagttcttatccaaatgagtttccctcccaattccacatcttaaaatcaacttgtatgcccttgtataaattacacaaaaccaggaaaacaaagacacagaaaacattttttcccttctaagtgagtgacctcatggattttgtttcacagcttatggaaagtgatgcagaaacacttctggtaaacaggatgttggcaacgaagaggaaatatctctctgcaaactccaccaactctaacctgccagcctgttggtacctgtgtagtaagaagagtctggtgccttgggggctctggcttgttacaggggagatccttactgccaggacaagcactggccacaggaaatataagctctaaaactctcctgtaatatctctgacccaatttagcaccacttttttccgtttcattttttaggactaaaacataaaagaaccagtgtccagaggcaagtgacatatgctttacacttacgaccatccttcatttcttcattcataaactttgcttaaaagactaaaattccggccgggtccggtggctcacgcctgtaatcccagcactttgggaggctgaggcgggtggatcacaaggtcaggagtttgagaccagtctgaccaacatggtgaaaccctgtctctactaaaaatacaaaaattacttgggcatggtggtgcatgcctgtagtcccagctactcaggaggctgaggcagaaaaatggcttgaacctgggaggtggaggttgcagtgagctgagatcgtgccactgcactccagccttccagcctgcgcgaaagaacaagaccatgtctcaaaaaaaaaaaagactaaaattcccaattccttataaaaaatacattattgccctcagccccgatggccactggcaaagacttttatttcccaatggatgagagagcctccttcaccttctcggtcatagttgggagcaggtgcatgtggtcatccacacacttggtcacaccaccttccagcttctgcttcaactgaagctccttactcccagcatctattgaatctttggctttgtcgttgcaatgcgtggtgcaccggaccaggtggtcctggaacttctccagctcactggtgatcaaagcctgggcttaagccagaggcacatggtggcactcgatgcactggtgcacctgctccgtggaggcctgactgtcctcacaacagctggtgctgcaccagaacatgagacaatgcatcttccagatgttctctctctccagactcttcaccatggagtccaccacctcctgcacccgcagctgctgcagctccccagtggcaaccctgtgctgccccagttatttgaacttttctaaatcttttttttttttttgaaacagagtctcactctgttgcccatgcagtggcgtgatctcagctcactgcaacctctgcctcccgggttcaagagattctcctgcctcagcctcccgagtagctgggattacaggcatgtgccaccaagcctggctaatttttgtatttttagtagagatggggtttcgccatgttggacaggctggtctcgaactcctgagctcaggtgatccaccagcctcagcctcccaaagtgctgggatcacagacatgagctactgcacccggctgacttttataaatcttggccatggccatgtgtggtagacaaaataatgtctcaccctcacttcccaagaagagctgcatgtctcaatccccagaagctgtgactgcgttatgccacatggcacaggggcacggccgctcaccagcaaccttaacccacgagagtatcctggaggatctgggtggccacaggatccttaaaagcagaggagggaggaagagtgggagaaagagcttatggggacagaggaagtcaggggattctatgctgctggccctgaagacagaggaagggccatcagccagagcagaatctgttctgcctccctgggtagctggagaggcaataccagataatgagagcaaagacctgtgtagctcttgcaatcctcaggggactctaggaggcagaaaatccaatcacccagttttactgatgaggaaaccaaagcacatagaggttaagtgacttgcccaaggtcacagaggaagtgggtggcagagtgggattgcatatgcctgtaaactcagctactcgaaaggctgaggcacgagactcacttgaacccaggaggcaaaggttgcagtgagctgagcttgtgcactgtactccagcctgggtgaaagaacaaaatcccgcctcaaaaaaaaaagaaaattatctacagggtccttcatagggaactcacaagatgattctctaatctccacagaagaccaataggtcaagaatagccaaggcatccctggagaacaggggaggggaacaagctctatctgatgtcaagatttatagcctgtagacaagggagtgctggcatggagcagaccaacagactgatggacagaagatggagcccagaaacaggtccacacgcacacacaacagagctggcaaatgggaaagaggagcattcccacacatggtcccaagccactcagctgtctacataacggacaaagtgaaactggatccctacctcacaccaagcacaaacatcaattccaggtgaactaaggacttaagcaggaaagacaaagcctattttagcaaggatcattcaaaatcatgtttatgatcttgagataggtaagcaattcttaaacatgacacacaacacactatcgtaaaggggaaaaagtatgattttgattacattaaaaacaaggactttagaaagaaccttattaataaattaatgatgagacattaattaacataagccacaaactgtgagacccgcctcactgggtgtctagggcgcagtcctcacagttgagcacaccctctttatggaaacatgctattcctgacttttttttttttttttttttttttgagacagcgtctcgctctgtcacccaggctggagtgcagtggcagcccacaggttttccattcaaggtgctttccctgacaatcccactctgccacccacttcctctgtgaacttgggcaagtcacttaacctctatgtgctttggtttcctcatcagtaaaaccgggtgattggatttcctgcctcctggagtcccctgaggattgcaagagctacgtaagtctttgctcccattatctgctattgcctctccaaccacccagggaggcagagcagattctgctaccccagtgacaagggatgtggggcccagaaaggctcaggaactgtgcccaggacacacagctgtctgttggggatgcaggtcgccatcttcctgccaaggtagagtgaggcctgcagtctccacgtgtctactcagctctttcacaccaacactttcaggagagaaaaataattattaactgcagaggcttaatgaggatatggagctgcaaggctttctaataccaataatttgtacctatttaagagcaaaggtgtaacaacaaaggcactggcaccaacaggctcagaagccacatcccttgcctccaggtaaaggagcacaactgtcaatttcacggagcacagaacattcccaggctcccacgggctcccacgctctgccctggctctcagactcacctgtagggaggagcgccccaggccttccgcccagaaatccaagggtacagggcaagagaaggggagctgctggggagagccgttacgacggtggggacgggtccgaggtctgaactgggcaccagtaaacctggcatccacagggcccaccagccccagctgctcagtcccaagcaagaccgctgggagggtcctgcaggggacagagtccctccttccaccagcccagcccagcccatggtggcagctgcctcgggcccagccctcctcagaaatgcaggctgcagcatctgccaggaacttggaggagccacccctcctaggcctgaaatgtgtccccactcaggggccctgaaatcccttccagaataatttcacagagacctcttttgaaatgcaaataccagggagaggctatattaagccactgacccctgatagggttagtgcctcaagttagagctgggggcagcccgggacagcctggcaaggggcagctgcgctcacataccacgagagctacctggcccactcactgcagcacctgttttggctgggcatgggggttctgccccagagaccctgtggccatcagagatgctggagtgagcgctcacagggaccccgcccaggtgctggggaggtccggctgctgcctgaggtctccaaacactaccgaagcccacctccaggaacaaggatatcatccttgttacttccagggacgcctccctccaatttagtgaatggcgagcaaatcattttctttgggggaaaagatcaaatattggcccagacgtctattaatttgcaacttgcattgaaactgctgagaacagaaaagctgagatttcgtttttctagttaaatatttgctgagaaaattccagtcctaaatttcaagagactgattcagcatgacattagaagggtcatttgagatgattaactagaggctctcgtggaagaaacctgagagaaagatgacgcaggcctccccgtgaaaacactcagttttagccaacagagaaagtgtgtgtgttagcatccttgcttttgtcttgattgcagcttcgaggtttttctgtagttgagtattttaatttatttctttcaggcctctctcccctgccacctccagatggtgagattcgtttccagtattcaaagactagaacaaaaactctcacctcacattgggttctgctggaagacaagccctccatcctgaccttggctcgggttcctcttcccaggcctttgtgagtggcgcccccaactccctctccctgaggctaatgagctggatgcctattttgaaaccagtgagtaagaagattcaagcaaagactcaaagctccgtttggacgggaggaggcccatgtgcctgggaggctgcatgcggggccgccaggcagcttctgtctggctcattatggaggatccgggagagaagtgaacgtcacaagtaaagctgaaaataaaatctggctggctgagcatctccaaattgccgaggagcaaaagctcatctccaagacaggcggccagcaggctccatgcacctctccatccacacctgtgctgtctgcgcccatggggtttgtgtggcggggaccgttgacgctcaggttctgcacagtgcctcccacagtctggggaaatgggcgcactggagccatcagaccccgcagagggagaaacagaaccctgttctgcaaacgtgaacccgttttgttcagcatgtcctgcttgtgtcgtttgtctatgacagtgatatgtgtcgtggcccaaactaatctgctcttaatatgctctaacctttcaggtacttttttttttttttttttttttttttgagactgagtctcgctttgtcgcccaggccggagtgcagtggcgtgacctcggctcactgcaagctccacctcccaggttcacgccattctcctgcctcagcctcccaagtagctgggactacaggagcccgccaccttgcccagctaattttttgtgtttttatagtagagacggggtttcaccgtgttagccaggatggtctcgatctcctgacctcgtgatccgccagcctcggcctcccaaagtgctaggattacaggagtgagccaccgcgcccggcctcaggtactttttaaagtcatgcatcaaggccgggcacgctggctcacgcctgtaatcccagcactttgggaggcaaggagagtggatcacttgaggccaggaatttgagaccagactggccaacatggtgaaaccccatctctactaaaaatacaaaaattagctgggcgtggtggtgggcgcctgtaatcccagctactcaggagactgaggcatgagaattgtttgagcctgggaggcagaggttgcagtgagccaagatcatgcccctgtactccagcctgggcgacagactgagactctgtctcaaaaaaaaataaaggctggacgcaggggctcacgcctgtaatcccagcactttgggaggccaaggcaggaggatcacctgaggtcaggagtttgagaccagcttggccaacatagtgaaaccccctctctactaaaaatacaaaaattagccgggcgtagtggcgcacacctgcaattccagctactcgggaggctgcagcaggataatcgcttgaacccgggaggtggaggttgcagtgagcggagatcgtgccactgcactccagcctgggcgacagagcaagactctgtctcagaacaaaaaaattaaaataaagtcatgcatcaggacacgtccacacaggatgtcttctgaaatgcctccaggcccatattcccccacctctctccaacagtttctgttctggcccctgctccccactcatcacacgtttactgagcacctactgtgtgtctgctcccgccccctgccccctccacttcctgccctcactcccactcccactcccactcccacttccacacacccaaggtctcaagaacagcagctccaaattcttcccatggcacctttggctcagatctggagagatggaagagctgacgctaatatcacatatcctgctattgcatgattaagagatgacttacaagtaacaaattggatttccctcttagagtaccccaagggtcctgaaagaggatttcagttctcgagctaattgcagacgatgtctgcaattcattcataattaaaaactatttggtataatatctttttaaagattctaatctgcaacctaaacgcaaagaaactctaattaaaattgctgtcactcattaattcaacaaacatttgcgggccctgtgtgtacgaggctgagatctagggatgccaagagggaaaaccacagtcctgccctcaaggtgtccttggcctggtggaaaagacaaatggggccaattagcatggtgagccccacgggggaggggagtccacggtgcagtgcaggtggggggtgagggggaggggagtccagggtgcaggtggggggtgcgggggaggggagtccagggtgcaggtggggggtgcgggggaggggagtccagggtgcgggggaggggagtccagggtacagattggaggtatgggggaggggagtccagggtgcaggtggggggtgagggggaggggagtccagggtgcaggtgggaggtattggggaggggagtccaggatactgacggaagtagagggaagggtatccaaagtgctgaaggggttgggaagaagggagtccagggtgctactgggggttgcgggggaggggtgtccagctgatgggggtatatgggagggctgtccagctgatgagggtgtgggggaggggtgttcagctaatgggggtatatgggaggggtgtccagctgatgagggtgtaggggaggggtgtccagctaatgggggtgtggggagggatgtccagggtgctgacaggatcagctgacaggggcgtgagggaggggtgtcaagtaccagtggaggcacggggaggggtcctgccctgcacctcagtttcaggggagggctctgcaggctgacagcagctgggtgacagcaggaagcagctgtggtcagcagccactcagggctggcatccatcctattgtctcactgaaactcatgacagtgggaggtgaaggtgacccccagatagtccccagagccagtgctacatgggaagccctgccctcctggggacagggggatggtcttgggggatgagagtcccactaaggagctgagcccttcctgctcctaagcccgcagcttccctgctcgcctacagccggcgagtgcagcacaggaggccaccgtagtgccatagagcgtgcacctaggcgtgcgtgccagtgagctcagtgggacggttcggcaggaacacggcttgaacccacaccaaggctggactcggcacaggccagagggaagccccacaggcctagctgagggacacaaaaagaacaaacgcaccccccgcgccacagtggaaagtccccagaagcagcagtttctacggcacagcagtgaccactcccgtgccacagccctgcccttttttttttttgagacggagtcttgctctgtcacccaggctggagttcagtggcgtgatctcggctcactgcaagctccacctcccaggttcatgccattctcctgcctcagcctcccgagtagctgggactacaggcgcccgccaccaggcccagctaattttttgtatttttagtagagacggggtttcaccgtgttagccaggatggtctcgatctcctgacctcatgatccgcctgcctcggcttcccaaagtgttgggattacaggcggaagccaccacgcccagcccagccctgcccttttgagcatgcagcagttggggtcaccgtggcagtaagggacatgtcagctcagacccccagacacacccacaccccatggcagggcagggccaccttcctgctggtcacccagactaacccaaagaataactgcaattcagctcttccaaatgcacgattatttcccgtttggaacccggcttggggatggcgaagtgcccttcctctgcttgtaatgataagccaacaaactgttcttgtccccaattcctcgtcatcacaatcaaaactaccagctggtcattgtcctggggcaccttccccctggctcagtggggcagggagatgccatgctctctgacgagggcacttttgactattaacccacccggccttcccaccctcctgtcctggcttgagaagaaattgcaatccgtcaccaccgtgaagcacttgctgaagctggggagaagaaggccccaagcttgggggccccaaacctctcctggcgcccctcctaactacgggacatccactgcttggattctgagggcccctggtggccccagactgcccctaactaagaggagagacatggcccacacttggacagagctgggtttctctcataccagctcctgggggcagctcagactctgccaggaaaacgcccatctttggccgtgcacggtggctcatacctgtaatcccagcactttgggaggccgagacaggtggatcacctgaggtcaggagtttgagaccagcctggccaacatggtgaaaccccatctctagcggggcgtggtggtgcacatctgtaatcccagctactcgggaggctgaggcatgagaattgcttgaacccgggagacagaggttgcagtgagccaaaattgcgccactgcactccagcctggtgacagatcaagactccttctcaaaaaaaaaaaagcccatccttcctgcactctgtggcctccaggttccaaggacaataaactcccagatccagatgcgctgcccagcctggttagtgggaaagcgtcctcctggccatctcagcatccgcccctgcagtgggaacacctaacgtggccaccccacagggctgcacagagacccagtgagccgctttctgagaaccaacgttcccaagtgcaaagtgtacacatgtcgacatggcacttctacctggagtgcatgggtcctgctctcctccagccataagacacactcagacacacagggtcctgccctctaatttccatctcatgagacaggagccaaaagagggattccccagggtcacctggagaggttttatttttattttgttttatttttatttttgagacagagtctcgctctgccacccaggctggagtacagcggcgcaatcttggctcactccaacctccgcctcccgagttcaaccaattcttctccctcagcctcctgagtagctgggatcacaggcacccaccatctcgtctggctaatttttgtatttttagtagagacggggtttcaccatgttggtcaggctggtctcgaactcctgaccgcaggcgagccgcccccctccgcctcccaaaatgttgagatcagccaaccgaaacccacttttcaagcaggacctgggagggaaatgttctaagcagagtgagcgtcgtggagcctccctcaggcatggctgtgagcgccacagctgcagactcaggaaagtggtgggtgtgcggggacactttaaaataccagaaaaatctacaaaaccaactcctgcagccaccacagggtgcagagtgagtttctggttttgccgctcttgtgaacaaccacccaccatcgagcacccagctggcctggggctgctgcacgtgccgcaccctgatcctccaggcagtccaaatggccaggtgtcattttcgctgctctacagaccaggcctcagaggatcaggaggtccagtgacttgcccaaggccacctgagggctgcctctgcacccacaggcgggggattttgttcccctacaagttcaggacctcggaagtcaggagacgcctgcaaatggagggccccccaacatccatgctcgccaggtctcctgaggcagcttctccaccccgggcccttggacatggccaggacacagagcagcatcccccacctccacctaccagatgccagtagcaccgccctccatactgtgacaaccgaaacatctccagacatggccacgtctcctagggggaaaagcagccccatctgagtgccactatactaaagaaatctagccagaaagtcactttttttttttttttttttgagacagagtctagctctgtcgcccaggctggaatgcagtggtgcaatctcagctcactgcaagctctgcctcccaggttcaagtgattctcctgcctcagcctcccgagtagctaggactgcaggcatccaccaccatacctggctaatttttgtattttttagtagagatggggtttcaccatattggccaggctggtctcatactcctgaccttgtgatctgcccacttcggcctcccaaagtgctgggattacaggtgtgagccaccacgcccagccgtgagaaagtaactttttaaaagtttttcttgtgaactagcagaaaggaaacatagtctctattctctctctctcttttttttttttttttagacagggtgttattctgtcacccaggctggagtacagtggcacaatctcagctcactgcaatgttcacctcccgaattcaagcaattctcctgcctcagcctcccaggtagctgggattacaggcgcacacgccaccacgcccggctaatgtttgtatttttagtagagacggggtttcaccatgttggccaggctggtctcgaactcctgacctcaggtgatccatctgcctcagcctcccaaagtgctgggattataggcatgagccacgatgtcgcgcctctctattctttttaatattttcaggtaagtgatgtctttccaggcttcaccccacgtctgtttcaccagcacctcgcaagtgcctagcaaaaggctgggcaaggctgagctaagacacacaaggaaacaactgccacgagaaggcaacggtcagggcgctgcgacctgcaatggcagaagcaggacgttccctcggggctgcttcccaggctccagcaggtctgcaggctcagtcattcctccaggaatgaagccggccaacatgccagatgctaccagacagaagatctccacgttcacaggctagtctcatttcaaaacacaagttccacttctcattgtaaaattctcctttaaaatatgtcagccctcaatggtctcagttacgtgtttcttatctatgtacactaacaacatggggcacactgatacacagtcctgctttaattcccggcgcaaagtctttctggcccaatttcaaccagggacagaaattacctcttttttcttttccataaaaatgcacccctttgttttaaaaactggtagcttgtgttattcccacctggatatatattcttccagattagaaacaggctcttggggccaggcgcagtggctcacgcctgtaaacccagcactttgggaggctgaggcaggcagatcacctgaaatcaggagttcaagactagcctggccaacatggtgaaaccccgtctctactaaaaataacaaaaattagctgggcgtgtaagcaatcccagctacttgggaggctgaggcaggagaatcgctcgaggcaagatccaccgtgctcggccgaaacccaggaggacagtagaggttgccaacagtgagccaagatagccaagatcatgccactgcactccagtttgggcgacagtgactctctgtctcagaaaaaaaccaggttcttggtaacaggacaaaatattagaaggtagacaaaaagagcatggaaaacatttaatatttctctgggagagaaaaagtatgtaagagaacagactaaacaaagcacgtgtctataatcccagtgctttgggaaaccgagatgggaggatcgcttgaggctgggaattccagaccagcctgggaaacatagccagatcctatctctacaaaaaataaaagtaaaaaaattagccaggcatggtggctcacacttgtggtcccagctacttgggaggctgaggcaggaagatcagttgagcccaggagttggaggctgcaatgagccatgatggcaccactgcactccagcctgggcagcagaaaaagaccctgactcaaaaaataaaaacaggcggggcgtggtggctcatgcctgtaatcccagaactttgggaagccaaggcgggtggatcacctgagatcaggagatcaagaccatcctggctaacatggtgaaaacccatctctactaaaaatacaaaaattagctgggtgtggtggtgggcacctgtaatcccagctacttgggaggctgaggtaggagaatcgcttgaacctgggaggcagaggttgcagtgagccaagatcatgccattgcactccagcctgggtgacagaacgagactccgtctcaaaaaaaaaaaaaaaaagattaaaatttcattagtgatatgatttggctgtgtccccacccaaatctcatcttgaattgtagctcccacgattcccacgtgttgtggcagggacccagtgggaggtaactaaattatgggggcaggtcttttctgtgctgttctcgtcatagtgaacaaggtctcatgagatctgacgtttttatagaggagttcccctgcacaagctttctcttgcctgccaccatgtaagatgtgactttgatcctcctttgctttccaccatgattgtgaggcctccccagccatgtgggactgtgagtcaattaaaccatttttctttatatattacctagtctcaggtatgtctttattatcagtgtgagaacacactaataccttacttctccgagtaagatgagattgtacccagctaagcaagctagtaaactggaaaacaggtcaaaaaagaatattaagaatgaaacagattcagaaaaaaaggcagacacacaatctaccctcgcggaggacaattcagctctatgatttctttattccttgtgacttgactggctacactgttaaatatgttgagcctgttttctgggctctctcttccattccgctggcctatctggctatccttggccactcttaatgacacactctcctaattacagtggctctataacaagccttgacatccagccaaccaagtcctcccacctcagctcttcctcaaagtggccttggctattctcagccaattttatttacagataaattttagaatcagattgtcaatttttttcaacttcctctaaattattctgtaccaatttgattggcactgcactgaatctacagaccagtctgggaagaaatgatatcttcataacattgagtcttctaatccataaacattgttaagccctccatttatttaagtccttcttaatttattttattttatttttttgagatgtagtctcattctgttgcccaggctggaatgcaatggtatgatctaggctcactgaaacctctgcctcccaggctcaagcaattctcatgcctcagcctccagagtagccgggattacaggcatgccaccacgcctggctaatttctgtatttttagtagagaccgaggtttcaccatgttagcaggctggtctcgaactactgacctcaagtgatccgcccgcctcggtctcccaaagtgctgggattacagtcatgagccactgcacccagccctgaatttctctgagtaacattttatagtgttctgcccatctttcattacatttattcttggttatgttatctttttatactattgtaggttatatatttcacttttcatttattgccagcacacagaaacacatttttaaaaacagtacaatcgtgcatcacttaaagactggggaaaacattctgagaaatgcgttgttagatgacttcatcgttgggtgaacatcacagagtgtccttagacaaacctagctagacccagctggtacagcctactacacacctagactatggtaaaaccgactgctcctaggcttagacccagctggtacagcctactgcacacctagactgtagtataactgactgcttctaggcttagacatggctggtacagcctgctacacacctaggctgtggtataaccaactgcttccaagctacacacctgtacagcatgttactgtactgagtactgtaagcaactgtaatacaaaggcaaatatttgtaagtctaaacatatctaaatatagaaaaggcacagtgagaacatggtataacattaaaaacagtacacctatatagggtacttaccaggaatgaaggtttcaggactggaagttgccctgggtaagtgggtgagtggtgagtgaatgtgaaggcctaggacataactgtgcactcctgcagactttatcaacactgaacaccaggctgcactacatttatacagaaaatttttcttggctgggcacagtggctcacgcctgtaatcccagcactttgggaggccgagacaggcagattacctgaggtcagcagttcgagaccagcctagctaacatgacgaaaccctgtttagccaggcatggtggtgggcgcctatagtcccagctacttggaggctgagtcaggagaatcgcttgaacctgggaggcgaaggttgcagtgagccgagatcgtgcctttgcactccagcttgggcaacaagagcgaaactccatctcaaaaaatatatttttttttctttatttgatactaaattaaccttagtttaccataactattttactttataaagtttttaatttaaaaaatttcttggctgggcatggtggctcatgcctgtaatcccagcgctttgggaggccaaggtgggcggatcacctgaggtcaggagttcaagaccaccctggccaacatggtgaaaccctgtctctactaaaaatataaaaattagctggacatggtggtgcaagcttgtaatcctagctactcgggaggctgaggcaggagaatcacttgaactcgggaggtgggggttgcagtgagccaagatggcaccactgcactctgcactccagcctgggcaacagaatgagactttgtctcaaaaaaaaaaaaaaaaaattgactcttttgtaacaacacttagcttaaaacacacattgtacagctgttcaaaaatattttcttgggccaagcacagtggctcacgcctgtaatcccagcactttgggaggccgaggcaggtggatcacctgaggtcaggagttcgagtccagcctggccaacatggtgaaaccctgtctctactaaaaacacaaaaactagcctggtgtggtggcatacacctgtactcccagctactcaggagggtgaggcaggaaaatcacttgagcccaggagacggaggttgcagtgagccaagatcacgccactgcactcccgcctgggtaactgagtaaaactctatctcaaaaaatatatatattttttctttctttatatccttattctataagcttttatctattaattttttttttttactttgtgttaaaaaccaagacataaacacacaccttagcctaggcctatgcagggttaggatcatcaatatcactgtcttccacctccatatcttgtcccatcgggaagtcttcagaggcagcagcacacagggagctgtcaccatctatactaataatgccttcttctggaaaacctgaagggccagactgaggctattttacagttaactttttttttttaaatgtaagtagaaggagtacacactgaaataataataataaagagtatagtacagtaaatacatacagtaaatgaccagtgacataatcatttattataatgatcaagtgttatgaactatacataaccgtgtgtgctagaattttacacgactggtagcacaggtttgcttacaccagcatcaccacaaacacatgagtaatgtgttgcactatgacactatcatggctgtgactgcaaggaggcagtaagaatttttcagctccattatcatcatatgacaccaccatcctatatgcagcccgtccttgacagaaacatcattatgcctcacttcactataagtatccagcaatcctgctgaaagcacttattatttaatcatttatttgcatgttttattttattttctttatacgtaactttatcatctgtgaataacagcaatgttatctcatccttttcaatgtttatagcaattctttttcttgtcttactgcattgactaagacttccattacaatgttgtatacctgggacttaatacaaagtctggcaaggagaatctctctccccgggagaatctgtcccaggcctctgtcccgggtctctggtagtagccagaggagttccttgggttggggctacatcatcctactctctggtcttcacacattctctgtgctctatgtctgtgtattctcctgctctcttcttttagaaggacttgccattggagttagggcccctaatccaggatgatcccatctcaaaaatccttaatttagttatatctacaaagactttttttccaaataagtcatgttacatgttctgggcattcatatcttctgggggtgggggacactgttcaacctactacatggagtaatccttaaacacaatgttattctcaccagattcctatggggttttcttttctaattcaacagacctttataatgtatttattgagctcacacagaagagagtacccattagaataatctaagaaaactatgtaaaagaacaatgggagaaaatgtgctccaccacctctcagaatatgctagaatgtaactgtgattaagatagtctggtggggccaggcacggtggctcacgcttgtaatcccagcactttgggaggccaaggtgggtggatcgcctgaggtcgggagttggagaccagcctgaccaacatggagaaaccccgtctctaataaaaatacaaaattagctgggtgtggtggcgcacacctgtaagtcccagctactcgggaggctgaggcaggagaatcactttaacacgggaggtggaggttgcaatgagccaagatcgtgccactgcactccagcctgggcaacaagagtgaaactctgtctcaaaaaaaaaaaaaaaaaaaaaaaaaaagcgaaactctgtctcaaaaaaaaaaaaaaaaaaaaaaagatagtccagtgggatcagccacggtggctcacgcctgtaatcccagcactctgggaggccaaggcggatggatcgcctgaggtcaagagttcaagaccagcttggccaacatggtgaaaccccacctctactaaaaatacaaaaaaattagccgggcgtggtggcagggggcctgtaatcccaggtactcaggaggctgaggcaggagagtcacttgaatccaggaggcggaggttgtagtgagctgagattgtcccactccactgtaccctggggacagagtgagactctgtctcaaaaaaaaaaaaaagaaaaagaaaaaacaacactccggtggtatgggatagaaataaacatggacagggaggtgacagacgcttcctctcctgtggctgtggaatgaggtttatgataaaaggtggcatttcagggatggtgggagagactcttcaaataaaagatattaagacaactgggaaaactaagcctccgccccctaacattaccccaaaattaactcaataaattaaagagcaacccatgatgggaaataagcctataaaccattaaagtaaaacatggggccgggctcggtggctcacacctgtaatcccagcactctgggaggccgaggcaggtggactacctgaggtcaggagttcaagaccagcctggccaacatggtgaaaccctgtctctactaaaaatacaaaaattagccaggcatggtggctcacgcctgtaatcccagctactccggagactgaggcaggagaattgcttgagcccgggcgatggcggttgcagtgagccgagatcgtgccactgcactccagcctgggcgatagagtaagactctgttgcaaatctaaaaaaaaaaaaaaaaaaaagttaaacatgggagagttttacactcctgggctcagcaatgctaacccccacacagaaaccacagaggaaaactgagacaggacaggaattggcagaccacaagaaatacagacagccagtcaacatctgaaacgaagcttcctggcaaaggaatcagaggaaggtgaaaatcacaggctacttagtacccatcagattggcaaaaatcttagacaatgataacatcaagcctgtgaggacatagacgaacaggcttagatgccagtggcgagaatatcaatcagcaaagcacttttttgggacaatttggtaatgtgatcaagctttaaacacgataaatccatccaattgtatatatctattttcaggaagccctggcacagatatgcaaagacttgtcccaaggacggtcaccactgagtcacaagagcaagaaatgtaacatgacccacacccccatctgtccctaccacaggagattttgcagaattttctcaaactgtatcgaggcagcttcccgcgtgctcctggtcccccacccttgggacaccatctcccagcatcctctgctctcgtccctcagaaccccaagccattaggcgctggcccgggatggccctcttctggatccttctcatctgtcagacataaaacccctccaccgtctgcaaacccctctcctaaaagccagaaccgtgcctcttcctctcctccagaacacgccaggctccaggagtgaccatcaccacccagcggccgcccccaccaccctgaatgtccatttccaccccatgcctggctcaaggctcagcggcgacctctcccgcttatcttcccaaacgggttgttttctgtgagtccggactctctgctctgatcccaccccagcccctgatcctcccagcatgatcccaccccagcccctggtcctcccagcatgatcccaccccagcccctggtcctcccagcatgatcccaccccagcccctggtcctcccagcattgctcagcaggaaagctgggctcacggtgtctgcaggactcaaggaagggacataactgcgacaaaaccctggcgcccggttttcagcaccgcgctaggttttaactgcctgctggagatgaccttttatatggagccgctgacagccccctcccccatggcgcagagatcacatttacagcggtggcggtaaccatggaaactggcagtcggtgcaggagggcgaacggttgatgggcaaccatggggacaatggcaaggctctgggcttattcagatgactggggtgtgctgaatgggctctgagcacaaaggccactgggagctctgggagcttccaaagggggcgtcaatgacacccataacttgtcacagaagaacagaggcccgagctagcccacacctgtgttttttgatctctgggggagtttacaacaatgactctgcaggccttttgtcagatgccatttttcttactttattataattatctggtctgttttctgggtgacctgggagcctttgactgcagtttcagaatgaagctcaccaccgtgtccccacaactggagctgcccgggaggccagcagcaggtcaggccactacattgcgtctctcaggctcagaacatcccccatctgcgggcagagctgtccttgtaagcacgcccatgatgggacccgaaaatcagcccatttacatgccaagtgctgagaaccctgtttctaacacccctccagagacccaaagatctgaaatgttaagatgtttccactaagaaaagtttatttatttatttattttattttattttttattttattttatttcattttttattgagacagagtcttgctctgtcacccaggctagagtgcaatggcatgatctcagctcaccgcaaccttcgcctcccgggttcaagcaattctcctgcctcagcctcccagtaactgggcttacaggcacccgccatcatgcccggctaatttttttttttttttttttttttttgagacagagtctcgctctgttgccctggctggagtgcagtggtgtgatctcggctcactgtaacttccacctcccgattcaagccattctcctgcctcaacctccagagtagctgggattacaggcatgcaccaccacgccgggctaatttttgtatttttagtagagacgaggtttcaccatgttggccaggctggtctcaaattcctgacctcaggtgatccacccgcctcgacctcccagagtgctggtattacaggtgtgagccaccgcgccctgccccactaagaaaagttttaaacagacatttaaataagctaataggagaccttttcgtgaagtggcatctcataggaacctacggaaacacgcaaatatccagccctgaaagctgaaaacaagctgtgagccaaaacactgtatgatgtgctttttttccttcagtcaatgcaacaaagatctgaaatgttatttgtttttaaatgccaaacatcactcccttcaacactgacatctcagatgagcaatagcagaatggatctttccatgaactccaagagtaattccccaaaaagaattcccgaagagttcccccgctggcacagtcatgggcttccttgtcttgaagagaaaacaaagaaaaatcatctgatctgcaccctccagggagtaatatgtgactcacttcattctgaaggagcagaggaagctcattacatttttataaactactcagaaaactgccctgtagaaaacagggctgggcgtggtggttcaggcctgtaaccccagcaccttgggaggccaaagtaggagtatcccttgagcccaggattttgagaccagtccaggcaatgtagcaaggctccatctccagaaaaaataaagtagctgggcacagtggcgcacaagcctgcagtcccagctactcaggaggctgaggtgggaggatcacttgagcccaggaggtcggggctgcagtgagctatgattgtgccactgcactccagcctgggtgacagagtgagacctcatctcaagaaaagaaagggaagggaaggggaagggagggtggggaggggaggaagaggggaggaagaggggagggtagggagggggagaggaggtggggaaagttggaggaaaggggaaaggggagggaagggtaaagtggaaagaagagggaaggggaaaggggagggaaggggagggaagggtaaagtggaaagaagagggaaggggaaaggggagggaaggggaaggaaaggagaaagaggagggaagagagggagggaaagacgcagaaaaggagggagggagagagggacgttattgagaaactggtgatcaaagtcactagtgacaaagctgactcttccgaagccccagtggcatggccaatactttgctttgtgctttacaaatccctgtgaaattggtctcaccaccccactgtcacatggggaaatcgagattctcagaagctgagtgacaaacctgaggtcaccaggcaagtgacagatgaaccccatgatcatagccccacactctcctgactctctctaactgttcccccttaacattaactattaaaccaccgtggccaaaatcggcagcaaggcgtttttaaagaagcatgctccgtaagaggtggtacagccactgctgaccttaacataattcccgggagacagcaagctgcacaagagtgtgcaccccgggagcaggtccccgcaggccacggcactcggagagaagatcaaaggctcgagttggaagtgcccactccatgggcaactccaggacagccccccttctccgtgcccaccctctgcagcagctttgtcccttaacagtcgggggaggctctctcctgatgaggtaagtggcctcggatggcctcagatggacaagactcagcttagctataatcacaggacagggacaggacctaagacccaagcagacttggagcccttggaatagaggccagcccccagcaatccaacctgcctcgctccagccaggagggcagcagaccctttgctgggagattcagcctctgcttccagcgaccctttcatgccagacgctaccagggcagctgagagggtgctgagcacgcaggacgggagccacacctgtacttccttctgtttcccagcctgggtgcactgatctcccctccctgccatccccatggtggtgaggacacaggggaggcccctacagccgtccccactgtgaccacgggaggctactgagacacaggaagaaccacattcactatgaactcaaccaactgcatccagcgagaggaagccaagaggcccgaggccggaccaggcacttcttgatccgcccgttccttcacttaagcctcatgcaaccctacggggtcagtattactgtccctatttttaaaaaccgaaaacggggcccaaagaagttaagcaagttgtccaatggcacacagaagccactaatgaacaagacggagatcccacaacaaaaaatatttaaggctgggtgcagcgtctcacgccggtaatcccagcactttgggaggctgaggcaggagaaactgcttaaggccaggagtttgagaccagccctggcaacacagcaagacctctgataaaaactaaaaaattttaaaagtagccaggtgtggcgatgtgcatccgtagtcccagctactcaggaggctgaggcaggaggatggcttgaacccaggatttgaggttacagtgagctatgacagtaccatgcactccggcctgggcaacagagcaagaccttgtctcaagaagagaaaaagaaaaacataaacatttaagacctacatggcaaaagagaccattgagttaaaataaaattcaaaattatgaaagatatttgcaacaagttaaaaattcaaaatagttaaagaaatgtaaatcgataaaagataagcaatctaactgaaactgcagactggcaattcacagaaaaaacaggaatggctggccaagcgcagtggctcacacctataatcccagcactttgggaggccaaggcaggcggatcacaaggtcaggagtttgagatcagcctggtcaatatgttgaaaccccatctctactaaaaacacaaaaaaattagccgggtatggtggcaggcacctgtagtcccaaccacttgggaggccgaggcaggagaatcgcttgaacccaggaggcggaggcagcagtgagctgagattgcgccactgcatcccagcctggcgacatctgtctccaaaaaaaaaaaaaaaacaaaaaaaaacaggaatggctgctaagcagataaaaaactgcatcttccccaaagagacatgcaaatcaaaaaaggaagacatttatttttacctacaggattagaaaagaataaaagagctaatctctccaatgaggatgaaaatatggcagatttcatcttcacacacggctggctctagtattaattagcacaaatattcccgaggccatttgaccacggttatcaaatgtgaggtatgcaaatcctccgcaccagtaatttcacttctgaaaatttattcctcagcaaaacctcaaaagttactcacacacacacagaccacacatcaaactaatgttccctgaaatgttatatgaaaaagaaacttggaaacaaatataaaaaagagtgctggctgaatatattgcaatacatcaacacagtggaaaatgaggccatctcaaaagagcaaggaaaggccgggtgcggcggctcacgcctgtaatcccagcactttgggaggccgaggcgggcggatcatgaggtcaggagatcgagaccatcctggctaacacggtgaaaccccgtctctattaaaaatacaaaaaatcagcaaggcatggtggcgggctcctgtagtcccagctactcgggaggctgaggcaggagaatggcgtgaacccgggaggcagagcttgcaatgagccgagatggcgccactgcactccagcctgggcgacagagcaagactctgtctcaaaaaaaaaaaaaaaaaaaaagagcaaggcaggtcttcatttgctagaacgcaaggtctgcaatcaaacatccttaaaaagcaacttgcaaaccgggcgcggtggctcacactcataatcccagcactttggaaggctgaggtgggaaaattgtttgagcccaggagtttgaaaccagcctgggcaacacagcgagacctggtctctataaacaatacaaaagtgagtatgcacctgtagtcccagctactggggaggctgaggtgggaggactgcttgagcctgagagtggaggctgcactgagtcaagatcccactgcagtgagttgagatcatgctactgcactccagcttgggtgacagagtaagacctggtctcaaaataaattaataaataaaaataaaaagcaatttgcacttggaggtgggtggggaaacacagaaatggtgtatatgtttatacccaaagaaaaatgttcggaaagacacccagaaagcgttgatttgctactttatgcacctctctttgaatttttacaatgatgttttactttttttattaatgagattcctaaggattttaaaaaataaatctattctacccatccttgccttcccgtcaaaaagaaactactggctgggcgtggtggctcatgcctgtaatcccagcactttgggaggccgaggcaggtggatcacttgaggtcaggagtttgagaccagactggccaatgtggtgaaaccctgtctctactaaaaatacaaaaattagcagggcatggtggcaggcacctgtaatcccagctactcgggaggctgaggcaggagaatcacttgaacctgggaggacgaggttgcagtgagctgagatcacaccattgcagtccagcctgggcgacagagactgtctccaaaaaaaaaaaaaaaaaaaagaaaaagaaagaaagacagaaaagaaactactgactactgacggattgctgggttctggatggacatgcagagcacccgccatgatccctccaagcctggcacctccaccgtgcctggcctgggggagcagcagagccccgcaggccctgttggggtttggggaggccccacctccctcctcagacttactgagcccctcagtttcccagatctcagacttgggctcaacccctgcaggcctcacactaggcctccctttgtgtatcacagtccagcaagagtccagcccaaccggccctgcctcaggtctgcgttctgccagcctcagccccagccccagccccccaagtctcacaagtccagagagctgtctcacctcctggaattctcacccatttccaagaccacttccttagggtgatgtttctaggactttcaacatctacattctagatcagttttcagggcataccctccctacccgcagtgacgcacagccgctgagacaagcccaaatcgagagttacgttctaattttaagatctctgtgccaccatccaaatgtggacagatgctgagatctctccggaaagatgcccgataacaggaagctgaggccaagcccgggggtgtcttctccacggtctgtcacccgcaccaccaggacacagcctgcacacacaggaagtccttttttccaacacataaaaaccgattccaggcggggcgtggtggctcacgtttgtaatcccagcactttgggaggccgaggcgggtggatcacctgaggtcaggagcctggccaacacggtgaaaccccgactctactaaaaatacaaaaattagccaggtgtggtggtgtgtgcctataatcccagctactcgggaggctgaggctggaggatcgcttgaaccagggaggcggaggttgcagtgagctgagaccgcaccactgcactccagcctgggcgacaagagtgaaactctgtctaaaaaagaaaacaaaataaaaaacaaaccgattccaatggagccaccggggcagcaaccccaagcaccccagagagagcacagaggccacaggtgagaagccacggctggggggcctccgtccagcaccacaatgcctgctgaagtcgggggggtagccagggagctactggactaccaagaagacaccatcactgcctccccttcagcagccgaggcagggggcccatgatgacccccacagcaccccgagcagctgcagcgtactccagctgccccagcggctccctccctccccggcctctgtgtggccctggctcaggtgggctatactcggtgtgccccaggccccaacagcctgcggtgtgagtcccagcccaacactcctccccaacccctcaccaggccacgtgcacccctcagtgcaggggccccgctgtgacccgcctcctcctcctgcctcgcccgcagtctgggctcacaggctgcagtctggactccctctcccatccctgaaacttgctggctgtgccgccagaagccccgcccctagagtactggggagcctgttcagtggggcaggggccccactacaggtgagcactgtgaagccggcgagcctgcctctttcccagaacctaacacagcccagagtacagtgggcagtcagaggaggcactggggggctgcatggagaaaggacatggctacctcctcacacccccctacctcccacctcagccgtcctgtgccgtggccacccatctggctgttcccaggccgtaggctcctaggtgggataaccatgctggggatagcttggtcccgccgggatagccctggctgccagcaacgctgtcatcatcactgcccagctctggtcctggcccacaggccttccataaaccggcacagcctgtacatgcccctttgtgactcggccctgcaggcgtagaccccctcccccacggctcctaggacaccagctgaccccctcccacccactctcgccactctcgccctgccctggccacagaggtgaacagatcctgggcgccaactggcccccgcgggacagaagccagccctgctcgtccacacacccagcaggtgtgcgggaggatttgccccgggaggaaggtgagggtgatgggggtggagggtgggatgggaggggcacatgggccctgcctcctgcctgcttccccctgaccgtcccctgcgtggtggtcatccccaccctgtggcccccccacccccgccccttgctgtcccctcgctgtcccctcactgtcctcctgccagagccctttgttgctgagcatttctcacagccggggtcccctccccaccaaagggcctcacttacttgccaaattccagctgtccctcagccccttcaccgtggcctcccaccccctcaccgcctggggcgtccagggctcagggaggggcctctccagagccacccccaccccatggcgcgtcgccttccaaggcggtgtgagtctcagtttggctggaatttagaaatgtcagatttctaagaatgaatatgttaaacagtttataaataacacaatccccatgggaatgccgagacacgcctgccgcgtgagaatggtctctgagaccctgagacgttccctgtgtctgtgaacctgggaaactgggccccggggaccgccatgcagtcagaccctgctgttgtctccgccaaggccagcggctacgatggtcaaagcaaccccgagctcccagaaggctccaggatagccacgaccctcacctctttccaaccagtggcctccatctgggcaggacaggccagcgctcagccattttctctgctagattttaaaggcgtcatcatcacacgacacctcctaggcatcctgtccctgtatctggcacccctccagtgcccagggcctgcactgagtgaggggctggggggctgcgaggacacttctctgctcccatggccaagtcctagagagtccccaagatggccaggttcacaggcaccacagggtctggacaagggggtgcagacctgcaaagcgggggctccaatgaccccatgtgccatgacacctgcaaggcagctctcatcacggctttctacagatgaggagatggggtgcagagggggtgatgggtaccccaaaccactgagcagggcagggttgggccaagccagcctcctctctacctgggacccacaggctactgttctgtcggtgttggtcactgcgttgtcacagtttaaggagccctgagcccatgccactggccatccagagggcagcccacttccatggcagtcatctcagtgggggagtcaactggacagtgggtgctactggaccccattacgtggtaggtaaaggccaggtcactgctctgtacccagcagtgctcaggatgtcccgtcacagaggccctgaatatcagcagtgccagcggtgctgggggagaccctgctgtcagctcaagtgagtagtgagtacgggagtgaggtggcggggtctgtggggctcctgaggatggctggcctcagggagctgggaggaggggtttcacgaggggatggctgtgggggtcaacagggtagcaggtgcggcagggcagtacccatgcacaatgcaggggctcagtccagggacccggcacacaggtgagtccttctccaagatgtcatgatgcgtccagtgaggaacgaaagacacgaagtgccccgctgcccggctccactcacagggcgcaggtgacaaggctggggacttcatgccacatctggccacagggctggaggccatgcaggaaggacagcccatgtccctttccagggcaggaggcaagaacatgtccagaaggctggctctaaaaccagtgaactgggctagctcctaaccctctgcatccagcagacgaggacggcccacgtggcaccctctgcgtctgtctctcacccatttaggtgaagtaataataacagctaaggtcttctggtgtgaaataaaaaaatgatttttttaaaacgagggatccaggctcaagcattttcaggaaaggaaatatctagttgctcagctcatgccacagaggccagaacacacccccttcctgagccacagaggctggaatgcaccccctttccgagccacggaggctggaacgcacccccttcccggagcttccccttggaggtaattaaagtgagccagacacacaaacagtccttcagggccccattgtccctggacaaagggaccgctcttcaatgtaagggccccatgaggtgcccccttggctcagggagggcccatcgccatgacaacccctgccaacaggagaggcgctgcggtaaacgctggggggacgagagccgccttcatctcggctcacacgcagccccagaaaagtcagagcgcagcggaaggaaaattaagacataaaggaaaaggcccctgggcttgggtttgggggtgttttcctttctcctttatgccttttggtacagccaaaattttctagagtgtgtgtgcttatctttgtgaacaaaccaaaaatattcctattctgaaaagcaacttctagtgctcctgataaagctttaaagattcaaaaacacaaagtgctggccgggtgcggtggctcatgcctgtaatcccaccagcacttcaggaggcccaggcgggtagatcacctgaggtcaggagttcgagaccagcctggccaacatggcaaaaccccatctctactaaaaatagaaaaattcgctgggcatggtggcaggcacctgtaatcccagctaccaggatgctgagaagggagaatctcttgaacccaggaggcggaggttgcagtgagctgagatcgtgtcatcgcactccagcctggatgacagatcaagacttcgtctcaaaaacacacacacacacacacacatacactcacaaagtgctggttttcttcacattatagacccttggcagtttttctggttttgtttttacatagaagatggacaccaaaggtgggacagaaatatgattcacacagagaaaaagcacatgcaacaagggcacacctggagactccctgagaaccacacgcaaagcaggtgcccccggctcttccagtctacacagctggctgctcaccacagcccagggcccccaccacaacctcctggccaggcccttaaatcccaaccgggaccaacacgtgtgtcaaagcatcgctccaaaacagagcatggcgtggagcagactttccttctgctctatttcataacacgatagtgactgtgctgagcttctttggcacgctgtcgttcattccttcaacaaacactgactaggccttgacttcgggccaggcacccaaagctcagagagctgtggatcccaggacttgagaagctcagggcagtcagtggggctgacagcgccaacacccccacaatgccacactcccctgggggcagcgggcatcacgggacaccccagggggtgatgtgctgaaggccaacagtggggaaggcagggagagtagggggcagaagaagagtaagagggtgagatgagggaaggaggtgtctccctggtatggggcagccccaggaaaagccacttttcccactgacgggggctaccagctctgtaaacatccctcggtcattagacacaatgacccgcctctctgctcactgctcatcccaggcactaggtaagagcatcccctgcccggatgacatgacggtcacctcctgcttttctcctggtgtcagctcttacaattctgccaggatgtccttcatgctgcctccgagaaacgcagcaagtcattcaggttctggggtcctgaagtgccccgagcccacccccagatcccagcccagtggcccccacgctgccaggagctctcagtgtggcaaacacagcagcagcaagagtgacggcggcgctcataagcccttactaagcgtgctgccctcgagggctcacagctaggggcaggtgtcccggatttgcagaggaggaccaagaagcactcagggactgaggtgtcagcccccaaatcaaggtccaatactggccaggtgcggtggcacatgcctgtaatcccagcactttgggaggccaaggcaggcggatcacatgaggtcaggagatcgagaccatcctggccaatatggtgaaaccccatctctactaaaatacaaaaaaattagcccggtgtggtggtgtacacctataatcccagctacgtagaaggctgaggcacgagaattgcttgaacccgggaggcggaggtttcagtgagccgagatcacaccactgcactccagcctgggtgaaagagtgagactccatctcaacaacaacaaaaaatcaaggcccaatactatgcattgccttgacatctgctgaagccaggaggcctcaaatggcctcaccacaggtcccccgccccactctgctccttcggataagatccctccacagtcaacccttcttgtcacggggatcaggcacagctcctgcttatagagggtagcgggtttccgttccctgccatccagaggaattattcagacaagctacccatgtgcccctgcaagaaccaggggccccccaccctcttgttccttccgggtccgggcttgtcccccacagcacctggctgtcctctgctcctgagtgctgccccgggtggccccgcatggcaggcgacgtcctcctccaggctgggcctctgtgctactcacgcactgctgctgacctcatctgtccagtgtcaggtgctcagcaatccccatcatcctaggacgggaatccatccctccccagtggagtgaataggaggccatttaaccagtgagtgacttctggggcgagattcaaacccgcgaccaccatcacgggcgcctctcaaaatcacgcgactggggacaatacacctggggactaggccatgtgggctcaacgctgctgcagtgagccagaacacatgaaggaaacactcaaggaaaggcggtatccaactacggcctttattcctctactatcaggcaacacagggaagagtgttcatgatcacgagaggcaacatggcctgtaagtgtgcaagaggattaaaaatacaagttcaaaagcattccccacgtggggtcctgagttttacaggacacttaaaccagcccacatacctgaccataccaagaagtccaatgcagtcacacaaaaacatgtacactaaaagggaggcaatccaacacacttcaagttgcaacttgagtatttcaagcaatattctcaaccataaaatcttaggagccaagatcaatgtggggaggccttaggtttaccataatgagacactgcctgtacactgttataattggcccttatctcgtgcaccagggataggagtcccagccctgcagtgtgcacttcctacgggcagcaacacttctgtttactccgtcactacatccccagagccaacactcacctgcgcagagagcctcctaataaatactggttggaatatggcccagaagctcaaagccatagataagtttattaatactttttgttgttgttgttgttttgagacggagtcttgctctgtcgcccaggctggagtgcagtggcacaatctcagctcactgcagcctctgcctcccggggttcacgccattctcctgcctcagccccccccgagtagctgggactacaggtgcacgcatccacacccagctaatttttgtattcttagtagagacggggtctcaccttgttggccaggatggtctcgatctcctgacctcatgatccacccgcctcaccctcccaaagtgctggtattacaggcacgagccaccgcacccggccctcatttgtaatttttcacagctctttacttgtcttgtctacacttttctcacatcccagcacccacctgggaaaggttcctggggtcagaatcatctgaccttgactgtgggtctttcccacccaggtaggctccaacaccaggggaatcccacccagtcctcgagatgacagtgtcaaaaacccagtaagcgagactactcacaatggagccggcatttctgaagggtgattatttaagccacacctcaactgcgggcctatgtgatgctgaagctcttccacccagacgtttcaccaggccccgacggtccatccaggtgagggctggagtcaggtccacctgcactctgatccccgggggcccaaggccacacacctctggctgccagtcagtcagaaccagtcctggtgaggtggggagtgggggcatgaaggatgtggcctgaggacaccccaacagcatctgtgtatcaccgccagacccttgctgaaagtcagggataatgcaatggcccctctcagcacctccccagacctccccagactctgtggtccctcctcccagcatcaaagagaagagtcactccccggagggagccggggctgcagggccgaggctcacggctgggctctggaataagaggggtgtttctgaatgaattgcccagccctgtcctgcctcgctgagtcattcccaagtcagcaagcacaagtcactgcgggaaaagctctggagctgccaccccttcccaccccagggatgcctgtccgtacccgccgtcaatccagccctcaggcctgggggatgagcacctcagacgtgctctttgcagctggcatccgctccaaactccatgcctccccacaaaagtggctctgtccaaaccccagccctcttgggccctggcaaccagcctagtcctcgccagccccttctagaaagcacccccagcaccccctcagcttcagcctgggctgagaaaaggctgtctggcagcgtggacccccctcagcgtcccagcagagccaaccccccccggggacactcatgggacacagcatgggcagtaggagccattccacccgtgcatcagccctctggccacactctgggacctcatggccctgcccaccactcccagcccacagccaggcaagtgacccccacctgggccctcctggggagagctgcacagctgtcggcagcacagctggaaccacagcccagcggtctcagtgcgtatcacaaaggctagcttgtgagtggatgctcccaagtcacatgacccccaggtaggaaggtttgcacatgtttcatcagggtaaagggaaagaggctcaccttaaacacaaactctatgaaggccttagacagaaaataggaaagcatgacagtctgtgtctccatggtgaagtcagctctgggagggctgagcctgatgcagagtgggtgtgcacaagctgcagggcaccccgggggctggaggtggaggacacagccaataggacgggcctcagtcacacagtgctcagggctggggactcaaaggcacagaggctgaggctttgtaagtcctgctgggggatcaggggatgactaagtcactggggcctccccagcctggcaggctcctatctgtgtaacaggctcccagcagccagtgtaggaaggcagccccggcaggaggatacaccaggacattccgcccatcctgcagatctccagcactgaccagcatccacagcacagtcgactggggttaagaaagtaggaatgagttcagagaaatgcaaatcaaaaccacaatgagatatcatctcacaccagttacaatggcgatcattaaaaagtcaggaaacaacaggtactggagagaatgtggagaaacaggaacacttttacactgttggtgggactgcaaactagttgaaccattgtggaagacagtgtggcgattcctcaaggatctagaagtagaaataccatttgacccagccatcccattactgggtatatacccaaaggattataaatcatgctgctataaagacacatgcacacgtatgtttattgcggcactactcacaatagcaaagacttggaaccaacccaaatgtccaccaatgatagactggattaagaaaatgtggcacatatacaccatggaatactatgcagccataaaaaatgatgagttcatgtcctttgtaaggacatggatgaagctggaaaccatcattctcagcaaactatcgcaaggacaaaaaaccaaacaccgcatgttctcactcataggtgggaactgaacaatgagaacacttggacacaggaagggaaacatcacacaccggggcctgttgtggggttgggggagtggggagggatagcacaccggttttggggggttttttaaaatttttttttatagacacagggtctcgccatgttgcccaggccggtcttgaactcctggcctcaagcaagcctcctgcctcgcctcccaaagtgcttgggattagaagcatgagccaccacacctggccaggacatacttttcaaagctcatttgctgccaccttgacacctcccaggtaatttcctcgaccagctcatgttatgtggctcctccggcccaacggaccacaaagtccattccctccacttctcacccaggcacacgactctctcaggacacaggcaacaccctatgttgtgccaggcaggaagctgcggggtggggactggcaggaaggcaggcggccgagggctgtcccctcaccctccctccccgtttcccactgcagctgacccccactgacccatgcccagaatcccacctaaaccagtgtcacggctggcaaagccatgggatgcccttttcgtgttttaaagcaaaggaacctttatcacccataagggatgagctgggctcatccacttcctgaggctggtgactctgggggaagaatccagagggtctggctctggccagggcaggttctcaccccaatggatcattcccctgaggtatacaaaccacctccccatcccccactgcctcagttttcccagctgcagagcatggagctgccaggtgcaagtttggcccctgaaggggcttggcccattttcccactgctccacctttgctctggcaaaaaatgctgggccgatgacccgcaggaaaaacaggagggaagagagaattcctgccacaaatgcaatgggtttcccgggccaaaccggagacttggacggccgtccaacaccaaagccaccggtttcctgcctacggggtcatcccggcctggttttcccccaaaacagactccatctggcacttgtcatcttccacggggcacaaggcggtatctggagggtagaaccacaatggctgatgtgcactgtcccggcgccccaggccggctcttgtcttggtacctctgtccacagtaaggtgcccctgcagacacgccgcaaaacacgcccctgagcttcccgtcctgcacacacagacgcacccctgacctctgacggccacatgcaggacagacaggaagtctcacagaacaataaaccttcatattttccattctctcctctttgaagaattgggagaacttgcgattatgtgttagaattttccatgcttagaagcgagggctgcattgaagaggcgactcccatggctatggcacttggcattgagacccagagggaaagggagggtgagctgtcatctgaaagcacccaccaccctgtgtccccatattctgtttattacacacctcccacggtgtccccttcctttttttttttttttgagacagagtttcacttttgttgcccaggccagagtgcaatggcaggattttggctcactgcaacctctgcctcctgcgttcaagtgattctcctgcctcagcctcccaagtagctgggattacagtcatgtgccaccacacccgggtaatttttttgtgtttttagtagagatggggtttctccatgttggtcaggctggtctcgaactcgtgacctcaggtgatgtgatccatccatctcgacctcccaaagtgctgtgattgcaggcgtgagccaccacgcctggcctcggcatcccctttctaaaggacatctcaaagcacagcgcggcccctcagcacagacgctgctatcacagcagaccttactgaggagtcagagcctgtgggggcaccatcagcaggggcgctcagcccgtgccacactcagtctcgttagaggagaacgaagggagtgggctcccacagaccacattgcactgcgacaaggcaaaccgatggtgtgctcgggcattcgggtggacagactgcagatcccactgagaagggaggcctcggttatctgatttaacacgaagaaaccagtcacacacacaaacatgaaggcaggcgtggcagtgggttcactaccctgccccaatgcccagtacctgtggatgtgacctaacttggaaataaaggctgcagatgaagatataaattaagatggggccaggcacggtggcccacgcctgtaatccgagtgtggctgcggtctctgcctccatcttcacgttgtggcctcctcattgtgtgtctgtctctgtcttctctcttataaagactccagttgtggctgggcgcggtggctcgcctgtaatccagcactttgggaggccaaggcgggtggatcacttgaggtcaggagttcgagaccagcctggcaaacctggagaaatcccgtctctactaaaaatacaaaaattagctggacgtggtggcgcatgcctgtaatcccagctactcgggaggcagaggcaggagaatcgcttaaacccaggaggcaaaggttgcaatgagccaagattgagccactgtactccagcctgggtaacggagcgagactctgtatcaaaaaaaaaaaacaccaacataaagacaagaaaatactgccacgtgctgcgctgtgcacgacccggaaaacatgacactggccggggagaagccagacacaaaagcccacgggttggggctgccagagggtacaggctttcctttgagggaaatggaaatgctttggaactggacagggtgggggtgttgcacaccactgtgatgttctaaacaccacaaaatggctcacattaaaatggttaacttcacgttctgtgaattccacctccgtagaaacaaacaaggacaaagatccagccaaattgcttcagtgtatccaaatgctgatacaaatacacttgaaccagcgtgtgtactggtggttttggacccaaggcttggtcatgaagagagggtgctgagggccagcactgggccacacagagcacagggctacgatttgggagcccccgggttggcccggggagcagcggtctcagccgcccactacagctcacctcttgtccaagttggtagaaccaggcagagcctgggcatcaggtctgaatgcccagctggtctcccttcctgggcggggttgggaggtgcccaagacatccacatacccagggaccccctcccatgcccctgagatgcaaggtcccagaacctgcagaaaaaccaggaaacactggaccctgctcaggtgccgccagaaacacgaagccttccttgcacccagggcccctaaaacagggaacatgtccatttgtgtggctgttgataatgcagtcaaataaccagagatttgatccatgtaccaggcacaagatttatagttcagtacctacccctattgcttttttttttttttttctgagacagagtttcgctcatcgcccaggctggagtgcagtggcgcaacctcagctcaccgcaacctctgcctcctgggttcaagtgattctcctgccttacccacccgagtaggtgggattacaggcacccgctaccacatccagctaatttttgtatttttttagtagagatggggtttcaccaggttggccaggctggtctccaactcctgacctcaggtgatccacccgcctcggcctcccaaagtgctggaattacaggcgtgagccactgcgcccagccccctattgccatttgtgatctcaagacatggtctaagagcacaggaaaaggcacagaaggaagaagagccccgagctcagaaggaggccctggatggcctcgaaccccaggacaggaccaaaggaacccgttcagtgctcaagctctcagggaaatcatacctgaaaccacagacacaggcacctgctcccacgcctcccacacctgagtgtctgcaacagtttgcattagtccttctagcatttttttcttgtaataaaatgtacataatacggatcttaacatggtaaccacttttatttttgagacggagtcttgctcttctcacccaggctagtgtaaaatggcctgatctcagttcactgcaatctcctcctccccagttcaagcaattctcctacctcagcctcctgagtagttgggattacaggcacccgtcatcaggcccagctaattttttgcatttttagtggagacaaggtttcaccatgttggccaggctgatctcgagctcctgacctcatgtgatccacctgcctcggcctcccaaagtgctaggattacaggtgtggcccactgtaaccatttttaaatgcacccacagtttaggggcatgaagtacctttacactgttatacaaccatcatcaccctccatctccagagcctttcatcttcccaaagtgaaactctgtccccattaaacgcaactcctgtcccctccccaccccctggcaaccaccattctacttcctgtctctatgaatttgactcctctagggacctcagtggaatcatacagaatttgtgcttttcagtcttgcttatttcacttagcataatgtcctcaaggttcacccacgttgtagtaagtgtcagaatttccgtcctttttcaggctaagtagtattccatcatgcaactgaaccacatgttgcttatccattcgtctgttcacagacacctgggttgcttccaccttttggttactgtgaataacactgctatgaacatgggtgtacaaatacctctttaaagatcttgttttcagccgggcgcggtggctcacgcctgtaatctcagcactttgggaagccgaagcaagaggatcatgaggtcaggagatcgagaccatcctgcctaacacacagtgaaatcccgtctctactaaaaattcaaaaaattagctgggcatggtggcgggcacctgtagtcccagctactcgggaggctgaggcaggagaatggcatgaacccgggaggcggagcttgcagtgagccgagatcgcgccactgcactccagcctgggcgacagagcaagactccatctcaaaaaaaaaaaagatcttgttttcagtcaggccggacacagtggctcacacctgtaatcccaacactttgggaggcttgaggcaggcggatcatctgaggtcaggaattcgagaccatcctggccaacatggagaaaccccgtctctactaaaaatataaaaattagccaggtgtggtggcacacgcctataatcccagctactggggaggctgaggcaggagaatcgcttgaacccaggaggtagaggccgcagtgagccaagatcgcgccattgcactccagcctgggcaacagagtgagactgtgtctcaaaagcaagaataaaaataaagaccttgttttgaattagagcatacccagaagcgggattgctggatcatatggtagttctatttttcatattttgcggaacctccatactgtgttccacagcacctgcaccattttacactccaccaacagggcaaaagggttccagtttctctgcatccttcaacacgtgttttctgagtttttttgaccacagtcatcctaatgggtatgaagtagcatctccttgcaggtttggggtttttttgtgtgtgtgtcagtcaactcactggcaaacagttattgccctgcaaaagcgtgtatgtgttaaacagggtcttactctgttgtgcagtctggagtgcagtgatgcaatctcagctcactgcaacctccacctcccaggctgaagcgaacctcccgcctcagcctcttgactagctgagactacaggttcatgctaccacacccagctaatttttttatattttgtatatttttttggtagaaattgccaattcctcggctcaagcaatcctcctgcctcagattcccaaagtgccaggattataggctggagcccccacgcctgcggtttcgacttgaatttccctgttgactaatgactctgagcatctttttttgtgcttattggccacttgtatctttggaagaaatgtctattcaagtcctttgctcattttttaattccattgttttcttgttgctaaattgtaggagttctttacatagtctggatattaatcccttatcacatataggatttgcaaatatttcataacagtttttaaatgggatactttctcagagcttgagacatacatgggcaagaaaaaggaggtttccccaatcacagtcagatctccaggctggatctctgcttttccattccccaacctacagaagggtgagaggcagcagggaaggggccccaggggatggccattccaccttcggaggtccagagggggccaggcagacccagcgtcaggcaatctgaacggggcagtgagtggagaacagcccaggcctcatctctggtgaaatctcaggccgtctccaatgctgggagaacacctgctcagcgggcccatgcccagcatcacaacacatcaaaggacagcccctggggccttggccgacagcggaactgcagggcagctgaacaacttcattctgatgatgaaaaccgccctgcaacaatcaactcactgacaaatggttattgccctgcaagagcattcttatctccgaatgctaacagggcatgtgattttatttgaattagttgctgttagtttactttaaccaagtgtcatttagattagatatgaacaaaaatcctaaaaaatatttaaaagaagatacaaaactgtgaataaaaacagactattaagaaagaaaaatcttagcctggtgcagtggctgatgcctgtaatcccagcactttgggaggccaaggcggacggttcagctgaggtcaggagctcgagaccagcctggccaaagtggtgaaaccccatctctactaaaaatacaaaaattagctgggtgtggtagcgggcacctgtagtccagatacccaaggggcagaggcacgagaatcgcttgaacttgtgaggcggaggttgcagtgggctgagattgcaccactgcactccagcctgggtgccagagtgagactctgtctcaaataaataaataaataaataaataaataaataaaataaaaagaaagaaaaatcttgatgggtggatggatagttggaaggagggagggagggaagaatacagggcaggagaaaggcgactccccggctagtacaatgcagcttctctgagctggaaggcccctcaacaggtgcgtcagcccctgctctgagcaggctcctcatctggtatctccctccccaggctccccaaataagagcctccagctctgaccagtgacatgcctgcctccctgcacctggtgcccaccagtccttcactctacagcttcttgtgacagctctaccataagagaccccacaaggacccagagaaggctccaaggagccccttctccagcctcagcccctcccacagtcctgcagcacggctgccactgtcgcccacccccacaatcaggcaccatgtgcaggtaactctcagccgtcccgtttcaggcaacgcagtcacttgcactgagcttccgtcctcagaaacctccagctctgtgccccagggcctcgccactgacagacagaggggaccgaagatggctgtcagcaccacgattagagcacacagaccccagagtctgcgcctggctcttcctgtcgctacaagctctctagcctcagtttctctgcccttaccatggggatcctgtaagatttcactgagacgatgcaggcacagactgaacaggcaccgcggtggtgggaagcacacagacccaggcggtcccgcgcccacttctcaatcacccctgctctgggccagcctccttgctacatgattcccctcttacaggcctgccccctgtgcttgggacacgcgtaagcctccaaacaaggcccgcagctctgagggacacatcctgtcccctgcacaatccccatgacaactggaaggggcgaagtcggtgtgtcgggcggctggaaggaaaggtgttaccccacacgatgaccttgaaaacggcccccacccccgttgtgtgcgtgtgtgtgtgtgtgtgtgtgtgtgtgtgtctgtctgtctgtgtgttttgtttgctttttaagagcccctggccttcatccaggacaagagaacaggcgctagagggatgaccccactaaaaggctgctgtggggcttttcccagctatggaatgttcacgcccaaaagggggacctgattactaaggtatccacaagtccttacccgaagcaaaagcctaagaattcagtcactggtgttttcctgaaaaatgcccatcccttcaccagggcgagtccctcagcacgtgtgggaggaaacgaaaacggctcctgggggctgtccgtgcttctgcgcagctccccttgtaccccaagtaaaggcactgggccctccacctggcaggcagccccctcccctcacccctccgagggtcccctccggctcattccagaaataatccacaccgcctaccaggccccaggtccacaggcttcaggacagggaagcccaggggcctccaagaggagcggccactactgcaagactggcctctggaccctcatggcttgaacttccacctgaatttcctcccaaaacaagcaagaggaaggctgggtcactgaattaaagagggtcgtttacggctgggcgtggtggctcacgcctataatcccaacactttgggaggccgaagcgggcagatcacctgaggtcgggagttcaagaccagcctgaccaacacggagaaagccccatgtctactaaaaatacaaaattagccgggtgtggtggtgcgcgcctgtcatctccgctactcgggaggctgaggcaggacaatcgcttgaacccaggggacagaggttgcagtgagctgagatcgcaccattgcactccagcctgggcaacaaaagcaaaactctgtctcaaaaaaaaaaaaaagagggttgtttactacaacccctcccagcattaaggaatttcattctagggaatttggggcatttatatgaacccgtgtgttcaggttacaggaaaagaagaaaaaattagaaaacgatttcccccaaggctgtgaactgaagaaatcacaccaaactcaggactgctttctacatgctgcacccagaagataacatctaattctgtttgaatccaagtgctggcagggatgagccccgtggcaccgggccacaggccacaccccagctaaggtggccgctgccaggggccccagaccccatctacccacctatccccttcctcaacaggttctgctatcgggtttcaaaatgtgcaggcacaggcaccagcccaaacccaaggggacccttcagcagcgacactggggccagcgtggggttctggcacgcccagcaacatgggcccgctccaggcgtggccagcaccgcccctcctgccggctcctgcccagggctttgggaacttgcccggagtttcacctgcctgctacttcacctagacttttaaaaatggtctctcaacaccctggtcggtacatggggccagacatagacctcttgtccccgggcagctggtgctgaggtgggcgccctgccctggtgagtccatgtcccgtggacctgtggccccttccattctcccaggcccctttttcccgtccgcctcctgctcctccattccctccaggtctgatgactcagagagaggcagaagttactgtcctggcaaacccgtctacgaagcttggccacagtagccctttgggagacaatgaggaagacctgacactgcccactcccaaagcccctgagacgggccagtgccacgctaggctgcaggacagctaggtgctgtgcgtaacccgccaactctgctgggcctttagctcagccttgtgcaggcctgtccccatgacaccctgccttccctctgaggctgggtcctgttcccatcccactcatgccagcaaccttgtcatttgcttctcagaggcacccccaaaccactccactcagatctcacagaggccaccaaggacctgcccttggctaacccatcacatctctgtccccaggctctccaaccgccagacggcatccatcacggatgaccccctcggagacactcgccctccctcagcctccagggcctgcacccgtgggccctcccctgcacgtggttattcctgctccagctcccaagcagactgttccccacccaggaggctattcgggccatggctcctcaaggctgggcctgggtcccctcctaactgccagcaccctcacttctgtgtccataacctgagctggtctccccagtctggacctgcacacacaatcaacttcaggacactctcaaagacgcccagccacacggggccaaaaatggcctcacgtcttctcaccaaagccgattcccggtaaggactctggctcagggaacgaacctctctcagtttcactctcatcctcccagagccagttttttctggaaggcacagacagggaacatgccttaggagctgcccggtccaggttcaaatcccactgctgccatcacaagctggtgccctgggagccctgtccttggtttgctcatctctaggatggaggtggcgacggtactttccataccacagtgtggcggctggaaaactgcaagcgatggggcctgcagagcctgggagggttcccggcacatggagcacatcggctgagatgtgtctgaccatctaagctggcaaagccctcctcagccacccccatgctggagcaagcatgatgtccccagcttccctcccctccactctcaccgcccagcagctgggacatgggacccagctcttgcctaaatcctcccgagggggcccaccaaaccctccacagtcagccctctctcgacccgggggatccatctgactcccggtctccctgcccatcacacactgcacacgtccaggggggtagagaagagtcccagcccgcccttgcctgcacctggtgtcaccactctacccctgagctcagcccccttgctcatcggatggtccatctccacccagccgcagaagtcaggaccacactggctctcccggctttcgcacacagcaggtgctcaataaacaaaccaacactccttatttctgaggcagtgtttctcaaggtatgagcaagccactgtctccagacttatcagagctctgaaatggttaactcattgccaaaagcactgaactctcctgggaaggtttgacactggcagaatcctgcttggccactgaagcaatttaagatggtccgacccaggctgggagcggtggctcacgcctgtaatcccagcattttgggaggctgaggcgggcggatagcctgaggtcaggagttggagaccagcctggccagcatggtgaaaccccatctctacaaaaatacaaaaattagccaggcatgatggcgggtacctataatcccagctacttgggaagctgaggcagctgaggcaggagaatcacttgaacccgggaggcagaggttgcagtgagccaaatcatgccattgcactccagcctgggagacagagcaagactgtctcaaaaaaaaaaaaaaaaaggtccgatccttccctaccctgtgagttccagaaaagcacgctgccatgcatccagacaatgcctgaacagtagcccgcccctacttccttctttgcaatcgtctgtttaaaagccactgcaatatcctgtatttaactaggcaaacacttagggaagctttatcaagcctagacgactttataccatccactctccaccaaagtcaacggcgagaaggttactcaatcctgttatttcaccgagtttcagtattttctgacatgcctgaatgactcatccgccaatcattctcacccacaaacgccactttcctacatccatgggtctgcaacacacacagcaggagaggcagggacatcgcctttctcccaagctccgcattctgcaacaagaggcctacagccctgcacccacggacacacactcaaagtgaattaaaaatgacgtggcccggccacagatgactggagaaaagaaatgtggtacatatataccatggtgtactattccactataaaaaagaatgaggccagacgcggtggctcacgcctgtaatcccagcactttgggaggctgaggcgggcggatcacgaggtcaggagatcgaggccatcctggttaacacggtgaaaccctgtctctactaaaaatacaaaaaaatcagccgggcgtggtggcgggcgcctgtagtcccagctactcgggaggctgaggcaggagaacggcgtgaacccgggaggcggagcttgcagtgagctgagatcgcgccactgcactccagcctgggcgacagagcgagactctgtctcaaaataaaataaaataaaataaaataaaataaaaataaaaaagaatgagatcctgggccgggcacagtggctcacgcctataatcccaccactttgggaggccaaggcaggtggatcacgaggtcaggagatcgacaccatcttggctaacacggtgaaaccccgtctctactaaaaatacaaaaaaattagctgggtgtggtggcgggtacctgtagtcccagctactcaggaggctgaggcaggagaatggtgtgaacccaggaggcggagcttgcagtgagccgagatggtgccactgcactccagcctgggcagcagagtgagactccatttcaaaaaaaaaaaagaatgagatcctgtcatttgcaacaacctggatggaactggaggtcattatgttaagtgaaataagccaggcacagaaaaacaaatatcccacgttcacacttgcttgtgagatctaaaaatcaaagcaattgaactcatggggacagagaatagaagaatggttaccagaagctgggaagggggtagcaggaggaaggtggatggtcaatgggtacaaaaaaatagctaaaaaaatgaataaggccaggcacagtggctcacgcctgtaatcccagccctttgggaggccaaggcaggcagatcacttgaggtcaggagttcgagaccagcctggccaacatggtgaaaccttgtctctaagaaacatacaaaaattagctgggtgtggtggcgtgcacctgtaatccaatgtactcaggaggctgaggtaggataatcacttgaacccaggaggtagaggttgcagtgagccgagatcatgtcactgcactctaggctgggagatacagtgagactccatctcaaaaaaaaaaaaagaataagacctagtatttagcccaacagtgagactacagtcaataataatttaattgtacattcaaaaataactaaaagagtataattggactgtttataacacaaaggataaatgcttgaggggatggagaccccattctccatgatgtgatcattacacattgcatgcctgtgccagaatatctcatgtacctcataaatacatacatctaaccaggcacagtggctcatgcctataatttcagcactttgggaggccaaggcagatggatcacttgagctcagaggttggagaccagactgaataacatagtgagaccttgtctctattacaaataattaaaaaaaaaatcagccaggtgtggtggtgcaatgagctgagatcaaggctgacatgaatcgtgatcatgccactgcactccagctggggcaagagagcaagaccctgtctcatacacacacacacacatatatatatacacacacataaatttgtgtatataatttatatataattcattataacatatattatatattatatataattcattatatataaattgtttttcaaaaataaaaataaaacaaagaatgtcaatgtttctgaaagaccactgtccagaaagaaggcagagcacattcaaggcttgagttgtccactgggtcatcagccacgttgccctgaaaaacgcaaacacagcctttatacaagctcataataaaaagttcctatcacagaatttaaaatctcattcaaaaactatcgcaaaaaatgaacatcttgtatcgctggatgtcattcaaaactggcagctatttgaatttcactatcttctgacttcaaaaaattttcaaaaaatgttttctccttggtgggctacataaaaccaccaacaactatctagtcacagtcacagtgttcaaccccacgccaggctaaatgaactgcccccaccacgtgggccttcccaggccctgccctccgatgcgctcctccctcctgggctcctctgctgaaagctggcagcccttcctggaatggctcccactaaacgtagtcgatggctggcctgttgcatacagcacctccaggctggtcatattgcatcaaaggctttagggcatggctgtaaatcctggggaagcaacaacactccattgaaaacagtggatgagtttgaaaccaccgcttccccgcattgttccttaataaaacctccagataattcaagggctgatctttttgtttggtctgttttctatccggtgctttgctgtctggaaccatagatcttatagtcaatagtgatttacttatttggagcattaaatcctagtcgaatggtctgagatttctgcgcatccttttatttatttatttatttatttatttatttatttattttgagacagtctcactctgtcacccaggctacagtgcagcagtgggatctcggctcactgcaacctccgcctcccagattcaagcaattttcctgcctcagcctcccgagtagctgggactacaggtgctcgccaccacaccaggctaatttttgtatttttagcaaagacagagtttcaccatgttggccaggttggtcttgaactcctgacctcaggtgatccacctgcctcggcctcccacagtgctgggattacaggcatgagccactgcgcctggtcatatgcctgctttaaagcacccatttgaccctggaataattcagtttagcaactaattcgtcaaaaatgttctccaaaggaagagaggggaatgcgaagagcgggctgctttctgcggatcgtggtttaacgccgagtgccccccactggctgtgcagtcctgagaaggccactcaacaccccagggcctcagtgtctgcatctgtaaaatgagcagcagcatgacaccactcagctcccggttaccagggaaacacatgagagcgcaaataaaagagtaaagaaaaccgcctgctggaacccagtcaaaggtaaccactgtcatccgggtgtgtgttggggcggtggtggtctggggggtggtgtggatgcatgaggacacagcacctgatttacacgagagtacgagtgtgtccacaaaggagcagagccaataactggatgactgagactggatgactacatagtgtggagcccccagcccattttcaactgtggtctaagctgcgccccaggtgagacagctctcaggaaccaacctccttggaagggaatccatcctaaaccctgctgtctggctaacagcgggggggcccacattactgataccacagacacacaaaacatccctgcccccagcatggatctgttcccactatctcgtccctcattaaatctaaaccctattattgggccaagtcatttttaaataggccaaatttcccattgtgctttatctataagataaagtggtatagaagaaaaacttcctaagaatatccataaccccggttaattcgcccttaagggcctattccatattctctacacgtttacaatctcacaaacctaaaatattcaccgacaaatagactgtactgccaaaattgtgcggaaggtttgtattataccaaaactgaacctgtaagtttcacatcttataagcaaactgtaactggaagctgttagctatccaacccttcctatattacagaataacagccaaccttggaaacgaaacaaatcagaaagttaactttttaattattccagggctcctgtggcaaagttgtatcctaataactcactgtttaaacaatttctctgaaacactgactcaaacagccagccaatctgagctcttcttggcagtagtttgggcttataaataaggtcacctgcctgcaccagcatccttggatgcacggtcaggcaaacctcaaagagccactgggggacctttactgttcccccaggcccctcgaagttcttctctctcttctgtgtctcccaattccaacactttctattagtccccctccccagcaccgcagaccagccccggcacacagggtcagaggcatagaggaccggccaaacttctgactgctgagccaaggtttcctctccctcctgttcacctccagccccagagcaggtgagcgaggtgcccacactggctccaccactaactgggcaggcctcttcaacagcacccaaattacaagcccgcatccaggagcagaagccaagatcaaatgaggctatgcttttcaaagagcttgcacaaagccctacacacctaagcccgactgttattatctgcaggagacagaaaagccagaccaagggaacaccggctgcattatagggtgactcagggacccatctgacaattccaacggtcccaccctggaattaattggcactgggaaggggcagtgacctctgatcttcccagagagccctgtggctggctgacgaaagagcatctccaagcaaatcctgtgacccagatcacctggaggccactttttaatagctgtactcaggagccactagcctgctgaggaaggcgctgatccccggtcttgaacttgggagaaccgcaggcctgctcccaggaaaatgctgacggaagcggcgcggtgcctctccccctcgctgggcctaggccgggcgcccacccccagcatccaaccggcggcaacaaatccttgcagagttgcccgggcccggcccaattgcgccccggcatgccaggcggagcccttggcgggttcctgaggctctccaggaggcccatcaggagctactcctcccaccccgacggccactcaccagacacagacacctccatgagcgcctccagcggccggttgttgtccaggtcgcggctgagctgcagttcgcccgtggcggggtccagcagcaacaggcgcagctcgttgccctgcacgaaggtgtagttgaggctgtctgacacgtcggggtcatgggccgggatgcagccgatcacgccggtggggaaactgttggacttgttggtgacatagttgttgaagaggatctggaagtcgggcagcacaggcgggttgtcattctggtccacgagaaggatgtgcaccgtggctcggctcaccagcggagccgacgtggcctgcaccaccagcacatactcccgccggacctcaaagtccagctccaccatggcacgcaggtccccgttgagcaggtccagctggaagaaatgccgcatgtccccttccacaatctgatacatgatctgggcattagggccttcatcagggtcgttagcacgaatctttgccaccaccgaccccactgggttgttctcctcaacaaacagctccagttcgtccttctcaaacatgggggcattgtcattaatgtccaagatggtcacctggatttctaccgaggcgctaaggggagtgggactgccccgatccacagccagagcccaaaggttgtacacggccacattctcccggtccagccggcgctgggtgcgaatcacaccggacgtgggctcgatgtagaagtccccatcgccgtcgtccccaccctggaaggtgtacagcagacgcccattgggacctgagtcccggtccgtggcagagacctggaggatgctggtcgagggtggagcatcctcaaagatggaaccctggtagaaatcccacaggaactggggtgcattgtcattggcatcgaggatgaggatctctagggtggtggtgtctgatttctgcgggatgccgttgtcctgggccatgatggtcagcgtgtaggcgacctggttctcatagtccagctccatcatggtgtacatggtgccactgtcggggtcaatgcggaactgcggcacggggtcctgaatcacgtaggtgatgcgggcattctctcctgtgtcctcatcgttggcactgagggtagcaatggaggtgcccacaggcctgtcctcactgacactcactgtgtaatgggagctctgaaagacaggcctgtgggtgttggcatcagtgacgttgattaggacatgcgcagtgtgcgaccgtgtgccgtcggatgctgtcaccgccagcacgtactgctgctcctgcttgtagtccagaggtagcgccagggtgatgaggccgccccctctctggctgctgagtgcaaagcggttccgggtgttgccgcctgtgagctggtaggtaatcacactgttggcgtcacggtcgcgggcctgcagggtcagcacgctgctccccacggccgcatcctcattcagacgaagctcgtaggtgggctgcgtgaacaccgggtcgttgtcattcacgtccagcaccgtgatggacacgctggtggaggagctcatggggggcgagccgtggtccaccgcctccaccccgaagctgtagtgctccacctcctcgcggtccagctcggcacacactgtgatccaaccggagctgttgtggatctggaaggggaagtcaggggtgggggcaggattcttaggcccagcgctgccgccccccagaaaggtggaggccgtgtccaccaggcgatagtgcagccgggcgttctctccagagtccgcgtccaccgcctgaatgtgcaccacggggtagcccaggggcacattctccagcaccgtggcctggaaggggctgctcacaaagataggctcgttgtcgttgacatccagcacctgcacagacaccacccctgaagaattgatgagcgggggccggcccccatcctgggccttaatgctcagcgagtatttctggacatcctcgaaatccaaggggttgatcacatccaggatcccgctcagcgagtgcaggtagaactggccggccacgttcccgctgaggatgctgtagtgaatggccgcgttctggccctggtcccggtccgtggcctgcactcgcagcacagccgtgttgagccccacgtcctcgggcacctggaccacgtagttctgctcgctgaactgggggtagttgtcgttctcgtcctccacctcgatgtacacggtggccgtggcactgagcgggcccggattgcgcccctggtcgttggcctccaccaggagctggtactcggccgcctcctcccggtccagcaccgcccgtgtgctcaccacgccagagctctcgttgagctggaagacgtcccacgcgccccccaacacgcggtaacgcaagttggcgttgatgggcgagtcgcggtcgctggcgcggatggtcagcacctcgtagcccacctccaggttctcccgcacgcgctcgcggtactccgactgctcgaagaccgggctgtggtcgttggtgtctttgaccaagacagtgatgtaggtggtggccgagcgcggcggcgtactgtagtccacggctttcaccctgaggacgtgcgtctccttggtctcgcggtccagtacgctgtccgtgctcacggcgcccgtggcagagtcgattcggaagtagccccgggagcgctcgtcgaacagcccctccatgtaatagctcacgcgctcctcctcgccctcgatggtgtagtgcgcgtgcagctggaggatgagggtgcccgccggttcgttctcaaacaacgccacctggtagttgggcatcggaaacttcaggctccctctgccgctcgtgccccgccgggcccgtcgcgccggccccgcccgggcttcgggcaagttcggcggcaggggcggcgatggggatggcgacgcggagggcgtccccgcggtggcggcctccagcgccagtcccacccggacggcgccagccgcgcgccgcagggcgcacagcagacgcaggcggaccgagccgcccggcggcaggcagatgggacggccgggacagcggggcctggggcgcggcgggcagcggcaggcgggtaaggtggtcggagctgcgagcgccgaatgctgcgcggccgcgcagccgccggggacggggaagcagagcgccccgcagagccgggcaccggttccgcagagccgggcacgggctccgcagccgggaaggtgcgtgcgcgcccgcaggcggcggctcagcgccgtcggggcactgcgggccaccaagcggacttgcagcggcagcgggcgccccgcgcccgagacgcgccgacgtcctgccagccgcccatcgcggcccacgtccagcagctcccgcggcgcccggggcgtgcaagcggcgcccaccgcgtaggtacagccgggccggagggcgaaggcgcgggtcccgccgggtacgcgcggctcccaggcggccgctcgcagccccatcgccggcagggcggcggcggcggccaggagcagcagcacgggcagcacgggcggcggcggcggcgccatggcccggagcccgagcccgagccgggcgcccgaacacaatccatgcacccggcgcgcctccgcatccacccggcgaggccggggagcggctcccgggcgcccggccctcggggcggtccgcgtcccgcctccccgggggccctggcggggactgtggggaccacgcgcccggcctcccccgcagcttccacttcgagagcactttgcgaaagtttgcgaagttggtttcaagatggctcctccgcgcgtcccgggagggcgccgcgcatcaacctgcggcggcggcggcggctccaggcggctccaggtggctccggcgcgggctcggccggacgggcgtgggaagcggggcgggcccggcgcggggcgggggctgagttcccggagcgggctgggcagctccgcgccgcgcagaccccggcggccggctgctgcctgggcggtgcgcttggcccgcgcccactccgcccgcgctctccccgcccccggcccggccccgccccgcccccggcccagcggcgtattgttcggccccggggggagccggctcggaggtgcgcgccgagaggatcgctatggagacgcgagggcgcggccgggacggggactggggccctactccccggaggcctccccacccagcctcccggtggggcggggccgaggcaacagggccgggaaaggtggggctggggcccccggtggccgctacccgtggggcggtggctccgcacctcgggctcggggccgcggctcagagcctggctccccaccccggcagaacagatccacggagaccgccgccaggagtgccgcgcgggtaggacccgggggcggaggactggggccgagaggccggggagcccccccccacccattaaggactgcggaggctgtcgaggagggttacccattttacagcaagacgcacggaggctaaaatgcttcaccccgactaaaactccctggactttgaagcccaataggcagctaccggatctgcgtcccacttggtttaaagcgcaacttttaaatgaaagaagaaaaccccggttgacataagggatttggagaggacggcggaggcgcgctcatctcccgcgtgcggcccgacccgagcgttcgcggacgcatcgcggaatccccgagcgtccggctcctcccgaagcgggttgcggggaaggcggggggctgcgggtcctggaagctgcctggggcaagcaagcacccgcagggatttagagctgtgccacagcccctgcccagcctcctacggaggacagcggggggcggggggcagagaccttagagctttcagaaaagtgacacacacccccgcctcctgcggggaaccacggggggccgggggcagctttaggtttgcgtgacgggtacacctgcctccggatggggcacagggataaagggggtggaggcttaggacttggcgaccccccgcatgggcggggctttgggactgtgccaccagcggctgggaag

SEQ ID NO: 103 - DNA, 137193 bp, Homo sapiens
  source 1..137193: mol_type = genomic DNA
ccggagccaccgttctctgcttctgttgcttggcagcattaaccccaagtggacagagcggagtttgaccatttgcttgtggacggacacagggttgctgtaaacactcgtgtgtgcgtttgtgtgaaggtgcatttcccgccctctgggctaaacgcctaaaagtgcaattgctgggttgtggctttgtaagaatcaggtcaactgttttccaaagaggctgcaccacaacgtgtgagaggccgtttcctggtgtcctcaccagcatttgatgttatctttattctttttaaaattccagctatgggactaggtacgtagacctttttttatttttgagacagagtctcgctctgtcgcccaggctggagtgcagtggtgccatctcagctcagtgcagccgccgcctcccgggttcaagtgattctcctgtctcagcctcccgagtagctgggacgacaggtgcgtgccactgtgtgcggctaatttttgtatttttagtagagacggggcatcaccatgttgaccaggatggtcttgatctattgaccttgtgatccgcccgcctcagcctcccaaagtgctgggattacaggcgtgagccaccgcgcctggcccatagacctattttggacaattttggggccacctgtcctgacccagctgtctgggctctcgtcggcctggcgtcagtgcccggcaggagttgggtgggtgccgagccgggcgagtgggctccatgggtgcagcgtggcgggaacgccttcggcagacccttccctccctcacggaggggattctgaggttgcacaggcagccttgacctcacgtggctcccgcactgagcttctgtaggccacgcgggaggggctgccctccggccttcccatggcgagtcccaggctgaagaaacagccccacgcggccccacgcagagggcgggcaggagcgctggcgggaacacgcgaggctcacgctctggccctttggggccgtcctgggacttcccctgttcctggccagagcccgtgtgtatggctggagggtgcgtccccagaaggctctgcaggccccatggtcctcccgtggtcctcccatggaccaatacgccctttgaccccccccccagcccccactcatccggccgagttgggagagacatatccagaaggtcagaaaggccatctggaaggcacgtctcttccccaaggagccgctggatgcagcagcccaccaggagtgttcaaggaagaaaagcatcacttcacgagaagctccacgtggtgcttgccggcacagactccaccacccatgattctccttattctggaaggttccttctgaggggccctgcacgtgtgcagggtacgtggcctgtgccagtgtgagccccacccccatccccactctggaaagctgctgggttcagggggcgcatttcttgcgggccaggagccccccacccagagcctcgagtcacggaaaccactcacagagactggcttttgttgtttgtttagtggaacactcaaatcaaaaacaggctcacggtctgaatagtcttctggtctaagcaactcagcaccagcgccgccaaggggaggccgcccttgtcctggccccgggaagagacgcagctccagccccgacgcagaccccatggcgcacacaggcaggcagagctcgaggtccaggcggctgccttgcgggaagtcgctgggggagggtccctggctgaggctgcaccaagggctggggagaggcccaggaaggggagagcgagctgggagctggggatgggagccgggaggtggggatgggttggcagaggggcagagccaagggcagaggcaagtgctggggccccagcagctgatgggaggcaggtccaggcctgcactacccgatggcttggtgcggcagcccatacaggaccaagttgagcgtggtgggaaggagctcggagctttggagcagcagcagcttgtccttcaaggtctgagaagcctcgtctgtggagaaaggggcgggagctatgaaccccgaggccccgcaggacgtccagcccggtgaggaccagggcacaggggcgggaagtggcagctgctccaactgagggcgctctggggaacacactgccattcgccaggcctccagggcgcccccaccacccgcacccctcccgcaccgaggtgtccaggcccgcgcagccgggtgacggcaccaggactggacccccgatccgaagcccaccatccccctctaccccttggccaggcgagctgctctgctgggggggcgcccgtctagagtgtggctgcggccttgcaggaagcagcagcctctgccccttttgaacagtgacagtcactgggctcatgcctccattgcagggaccagaacttgcaggtcatcgctgagcagcagcagcgggacagccagcctggctctgcccttccccgattccccagcagggcatcgtgtgggccccacactggccacatcacggcggcatccgtgtctgtgccctgctctgcatttgcagggatgagtgtgggttccgtctgccttcctcctgcccctcgctccctctctcccccaacaagcagggatccttgggaccggtatccccggaccgtggaccacgtgctctttacacgataagctcctggtgagcggtggatactgaaggcctctgggggaagccttcttagtcagggcagaccaccccctccgtgcaccgctgagcgcctcaactcagggtcccgggaagctcctctgtggctcctccccggggtcccgggaagctcctttctggctcctcccgcctcaccgtggcaggagggttttgctgactctgaaggacggctgggtggggttccgtctgtccgtgtttgagaacagaccatgtcccgtgccccttcccgacttttcccctgtgaggccaagagagggacgggcgctggatgccatgtgacaggcaggctgctctccaggacgccaatgggagacacccctcaacccatgcattcctcttccgggaggcctcttcctgggctgggactcctggtcatatcaaggggccgtcgggcactgtggtgcaagctgtcggccccctaggagtccttgcttggggagggggccaggcacagctgccacctggatttcccactggttcccagacagcccctgggctcgtggggattgtgtgactggagctgtcaacgaggaaccgtgatgctttccctctgggttctggagccacgtggcactgtgggccgtcactgccgagggtcgcgccacggtggggggctggggtggtacagagacgcaggcaacttccaggcaagaacaagccctccctctttccggctcctagttaacgtctggagtcccaggtcccccacggagaagcggagacacctgtccctgcagggctgtgcagtgcacgtgccccatgggcagtggctgcagagggtgctgaaggccgcggggtgcaggccgcccctcccttaccttggttcaccgcctcgtcgccactcatcttctgaaggagacgcactgtttctccaattggcttcccaacggccaacagatctaggggagaaacgtcccctcaggagggcatggacaccctggcagccttgctgaagggttgcgggacaggcccgggatgccaggggcccacgcactttcccataagacgctggcccgcagcgcgttgtcctgcagcagcgtcggccactggtttgccaggatgctcttgacgcccaccaggctcagcaggatggccgcctcaacgggctcctccagggacagctgtgaggcgctgtggggacccggctcccgtgggctggtgccaggggcccggctgagccgcccccctccccatgcacagccacacctcgccaactgctggaacgcatgtgcaccctgacagctctcaccgttcttgaaacccgaccccaggtccctcctcccttgtgggtcccacgcccgtctgtctgacctctccatcctcagcatccctgcccacccgttccaggcagccaggcacctcctgtgctccacgctctccatgtgcctcttcaagctctggtaggaccgcgccaggtccagcaggactgccacctggcactctgccgggacgggaagggcagctcagcagccttggcctgacatggggagtggggatggggtgtgggcaggtggggcctgtgccccaagggcgcagcagggcatggcacgctggccactcagctccgggctccgacctcatgaccgtcaggttttttccagggaccccctggccacagtggacctcgccagcctcaggagcccagaccccttcacagcctcctcccggcgactgtgccgggcaacaggaagtggtgggaagcccacctgggctcccccagcctcctctgccctggagggcatctcggcacccccaccatgcctggacaccctggcaccccacatgaatgaggtgtacgaggtggagccctccccaaggacggagggacaggctgctggggggcagcactgactgggggctgatgtgagggggccacatgtccctgtgtagtggagacatggcaggctcctgggatgcaggggagccccgggcactgggcatgagctggtcaccctggcctgggccctccacggaagcagggatcgggggccagggcaaccctgggcgctgcccacttccactcgcagcctggccgttcccgcagacaggctgtccagctgcgtgaggccgaggctgctggggagttgggggagccctggcgaggcctcttctactttactcactgcctcagttggaattcaactttcaaagaggcccatttctaactccacctgggatgggcttccagcacctctgatggccaaggcccaggcttgcagagcagagtgggggtcctgcttggccccacccaagtgcaggccctgggtgccaggtgccacaggacaagtgtccacacacctgctccgctccatcaacagggcccacacccctcatggggggcacagcaactcccgagtccctaaaagactcctgtcaaccccacacagtggggccatcagcagccccatcagagaaggtcacggcaagtgggctggccctgcacagggggcgtcctggtggggctgcagccacaggacgttgagtcagaggggtggcctcggcacaaggctgagccacgcctgcctcctgaccactcgccctgcggtgtccgagtggctgcgcctgctgtctccgtcagcactacccttgggccgtggcgtgtgacagggtgacgtacccctacgtgtgtgctgtgctcacgccacgcccccagcctgccctgccatccccacctcctgccaaaagccccccctgtgctggagctggctggggtgtcactgtgccaagcatggcaggaccacacctggcagcccctccacggctggtggatggcgaaggggaaggcgaggtcccgagtgcccacgattaaactagaggccctgagggaggggccgtgaccagcgcggtcctgagcccaccccagccttcctgggctcctgggcccagcactgactcctgccaggtctgaaaagctgggctgggtggagtgggggcactcggaaatgaagggcgggagggccagaagcccctgtggctgccacgtctgtgtgggccaggcagggggtgcaggggtgggtagaggtcgtccacctgcagacaggaggggcctgcagtcacagagggtggggggcaggagggggctgcggccacagggggtgggggcagcaccagcaggtgacagtggccctgctctgccctcaggcgggtttgtcctgtgcccgcgggggagggggtgctgagaggacacctctcaccttgcaagttcatggcgaccaatctctccactaatatatgggacaggaagctctccattccatagaagaagaaaccgctgcagctgcccagggcctgctcccactgggcctggctgcagagagaggagagcgctggtcaacagtgcccatgcacctgtaccagaccccaccgtgcgttcttaaagcaggccacatcctgcgtggtccacgcctgtcccatttgtgcattaaactgaactttctttcatgttcctaatgcccacgcctccctcctctgtgctctgatcacaggggtcacggcggagcctagtcaaggggacccacggtgagcatggacttctacgctggaatgaacacccctactcgggcggggctcgctgcgggaaacgctaggaggggctttcccaatggcccagcacctggaggtcaaggcacccccagtactccaggcatgggagacagtgaccagaccagggttccctccttccatacaggatcccagccctgcccctgcagccccacccctgcacacacctgcccctgcagtgccaccctctgcacacacctgcccctgcacacacctgcccctgcagccccacctctgcacacacctgtccctgcacacacctgcccctgcagccccacctctgcacacacctgtccctgcacacacctgcccctgcagtgccaccctctgcacacacctgcccctgcacacacctgtccctgcacacacctgcccctgcagccccgcccctgcacacacctgcccctgcagccccgcccctgcacacacctgcccctgcagccccgcccctgcacacacctgcccctgcagccccgcccctgcacacacctgcccctgcagccccgcccctgcacacacctgcccctgcagccccgcccctgcacacacctgcccctgcagccccgcccctggcgtggagcctgtgacgtggaacgatccctcccacccgtggtgctctctccctgattgctctgttccctgctggctgcttctggacacctctggaccacggaaccccaagggcatctggggggcagagtctgcgagtggtctctggaggggctgcagtgctgctggtgaagaggcagcccctgctgctggaccatgtgctatcagtgaccctgggggccccaggtcgccatctgtaaagcagggtaacagtgcccctcgcccagtctctgtgaggattcaaggagctgggtctgtctcagcattgcatgctgtatgtggcaggactggcagggcagacccagggagccgggggtagggggcagtggctccccgctggacccccagacctgccacactgcaaacggctcctgggagcccagatccgaacctgggaaagtgcttgcttcccagatgtcccgcccatcgcgacgtgaatgtgtcttggaatctttccaaaatgtcttgggtgatggagacaggagttagcatttctgcaaggagaacagggtggatacagaccacggtgtttcatcagacacgggtgtgcagggccggggtccctggggaggggtcacagcgaatgcaggcgcatatatcagtgccctgccatgcccgggtggggtgatggtagaaccaggctagccagagagaaaacctcaacaaattaaaatatttacagccaaaatggggcaagcacatatgcagatttcggagcctcgaggagtggggcaccagttgctgcccacaactgcaggacggcaggaggcccgaggctggcgtgtgcctgaacagggagccctgtgcagcacccacctgggccctgggcctcctcgtatgggtccacgacgactgggtcccggtcaaggagaaacgggagcacagggcggggtctggggcccccccggggcccatcaaaggatacacttgaagttgtctgagtcgactatgatgcagtcaggggggatggtccgggggatgctgccctgcaaccacagaccagggtcagcaggtgcaggggccaggagcctgacctcccgctgtgcccaccagcccgatcccctatcacaggcccccacccaccttcctgcccttcttcgctaggcttctctttttggggtctctgcttcttccctcctttttcacgccaccttctgttgaagacaagaaagaggcagggatgtttggcagcagctcgaggcagccctccggccacacggtcggttaatttcatgttatgcaaatttcacttaaatgaaaaaaaaaacaagttgtgagaacaagcggttttaatttgtgtaaagttgacgtggcaataacttgtgaaatgcaaaggttcacagggttgggaaagtccttaagaaagaaccagtctccaaaggctccaaggcccacctggctgaccattcacccaccccactgggtactcaccagtgtgcctgccatgcccgggcccctcactggttccagggccttctgtacagggatttacaacctgcccctttcgacacgaacactttcttttgcaggctctgagtagatagtcatgtgcctgggaaggatggccacttccctcctgtttctgcccccgactttcctttctgtgtgcctatgctggggcctccagcagacagcggaatggacgcacgcatggggcccactgcctgaccgccttcaaagaggctgcttctgagggatcctcattaagaaggaggctgtctccagcttttgatggatttctttatcaggatggggcattgcgtttggttcctggctcacgaagtaaatatgtgcattttatcaaatgcttttcccctgcgctgactgaaatgcttgcactgttcctctaggacatctgtacgttttaaggttaaactggggcccggcacgtggcttatgcctgtaatcccagtgttttgggaggccgaggagggaggatcgcttgagcccaggaggtggaggctgcagtgagctgtgattgtgccactggactccagcctgggtgacagagcgagaccgtcaggaagtggggaggaagggaagagaaaagctgaactgagtgatggcagcttatctttttatgtattttttgtgctgttctggggcagtctgggaggaggtaggctggcctagggaaggatgggaggagctgtctacttttctattactggggagatttatctaacactgacatgatctgtttcttgacagtctggcagaattcagtgaaaacatggaaaaacatattttttgtgggaagactcaaatccatcgatgtccttttttattggttatgagactactcaggtttgctttcttcctggcatcggaaggtgttttctcctagtattttgtccttgctgcccaggggttttgctacgttgattcaaagttgctcggggacttccgggttctcctgtcgctgctggtgcgtcgttagcgctgtgtctttccgtttctggcgttctcggttgctcttctctgtggcatctctgtttccctggcgtcttctgcatgttctcctctgctcacctggggatcattctgcctccttgctctgacttcttctttttttttttttttttttttgagacggagtctcgctctgtcgcccaggctggagtgcagtggcgcgatctcggctcactgcaagctccacctcccgggttcacaccattctcctgcctcagcctcccgagtagctgggattacaagtacccgccaccacgcccggctaattttgtgtatttttagtagagatggggtttcaccgtgttagccaggatggtctcgatctcctgaccttgggtgatccgcccaccttggcctcccaaagttctgggattacaggcgtgagcaattgtgcccggccaactctgacttcttaaatcagatgctgagcttctgaattcctggcgcttttcctattctgacgttggcatttacatctgcaataccttctaagttatgtttagcaacatctcgctagtttttgacatttccatgatcatttcatgtcttctgagtcccatgagatatttagaagtgagctgttgaattttcaagtgcgcgaggatggaaaaaagtctgccttcgggaactgctttctaccctcatcacgctgtggcctcagatgcgggccgtctgcctgtgtctgaggcacagtgggatttgcttctcaattttgtgattattcccaggatacttgaaaagattgcaaatcgccacttttgaggcacagagttccatgtctctattaagccaagattgttaattatgtcgccctgaatctctctctttttgctctttgtctggaccgtcagtaatccaggcgtggtaaaatctcccagcgttggggctggccaacggctgcaccccgcggtttttgctttttattgctttttgtatttagaggctatttcatacctctgaggaggcgaactttcgattctcatgatgtccatgtccctaataatgcctggctctaaagtctgtttcctctgagagtcagacaccggccctccgggttactcttaaatatttactcattttcccttctcttggtttatcacgtgggggtcatttgtgacgggcgtgcttcctgcaaagggcatgcggctggcacctcttatctcctgtgtcttctcactggcagggttggccaattttctttttttgatatatgacataaatgggccaacttctaccatcttactactttatttttatttgtcctggttttctacctgtttctccatgaccagctgttggatttgattgaggtaaccggccccttcgtcttcctcattcattcttccttctctatttgttgggagtttgcacaccgactctctggtggtgtccttagcgctttacggcagtgcggccacacctggcggcgccccagactcagcggttggcggctgaggacactcaaggctctagatcaccggcagcccggctttcagtgactctgtggtgagggttctgttagtttgtgtggctgctgttaaccaattactacaaaacgcaggcttgatgtggcactgcttcctgtctgacggttctgggagtcggaggtccgaatggggtcactgggtcacagtgaacggcgtcggccgcgctctgcctggaggctcccggggagaatcctctcctggctcctggccacgccctccatcctcaccgtcggcagcgcagcccccaggctccttctcctgcttctcttgtgtgagggctttctcatcacctgggcccacccagatccccaggatcgtctcaagtctggaatcgcatctgcaaagccccaggaccacgcgacgtcgcaggctcacaggcacccctgggcggcccgtgtcctgccaaccacaccgttgctggagcgtctagttgggctgctgctttccttttctgcccctgccatgacagtggtggccgcgccgggcagtggggaagggaaggatgtttcaataagcgatgtgcagacagctggatcccctcgtagaaaaaaccttaaactccacttcacactccacagagtccatctcggatggcagttaggtggaaacgtgaaaggtggaacacaaaaaaagatgcatttagaggatgtcatcggagaatattttcatgatcatgaggtgaagaaagattttaaaaaccccgaacacacctaatgacaaaccacagctaacagtgaaaagcacaaagctttcacctaagatcagaaacaaggcaaggaagcccactcttgactatttaaacagcgctggaagtccccaccagagcagtcgggaaagaaagagaaataacaggccaggtgcggtggttcatgcctgtaatcccagcactttgggaggccgaggtgggtggatcacctgagggcaggagtttgagaccagcctgaccaacatagccaaaccccgtctctactaaaattacaaaaattagctgggtatggtggtgtgcacctgtaatcccagctactcgagaggctgaggcaggagaattgcttgaacctgggaggctcaaggttgcagtgagccgagattgcgccactgcactctagcctgggcaacagagtgagactccatctccagaaaaaaaaaaaaagaaaaaaaagaaagaacaggcacacacatcagaaaaaaagatgtgaaattatgtttgcagataacaagctcttatatatacaagacctcaaagactctaccaaaaaactgttagaactaataaattaagtaaagttgaaagacacaaaatcaacatacaaaaatcagtagtatttctatacattacaatgaactatcattaaaatcagtactatacattacaatgaactcatcattacaatgaactatctaattaagaaattaagaaaaccaccctatttataatatcatcagaacgaataaaatacttaggaataaattcaactatcaagtgagagatctgtgccttggaaactgtaagacactgaggaaacaagttgaaggagacataaataaatgggaagatatcctgtgttcatggattggaagaattaatctttttaattgcccatattacccaaagcctacagatgcaatgcactatcaaaattccaatggcatttttgacagaaatagaaaagcaatcctaaaatttatgaggagccacaaaagaccctgaataatcaaagcaatcctgagcaagaacaaagctggtggcatcacattacctgacttgaaattatgcaacaaagctatagtaatcaaaacaatgtggtactggtataaaagcagacactgggcccgatagaagagaatggagaatccagaaataaacccacacgttcagggtcaattgatatttgacaaaggtgccaagaacacacaatgcggaaatgacggtctcgtcaataaacagtgttggggtaacccaatatccacacacaaaacaatgagtttggagccttatcttacaccatctacaaaaaccaactcaaaatggattacaggcttaaatgtaagacctgaaacgataaaactactagaagaaaacacaggataaaagctccttgactgggtcttggcaatgattttttggatataacattgaaatcataagcaacacaagcagaaataaacacgtgagatcacatcaaactgaaaagcttctgtatggctaaggaaataacgtaatgcaaaagtgatctatggagtgggagaaaatgaatgtagaatgtatatttgataagggatcaatagcctaagtatataaggaactcctataatacaatagtaaaaaaccaaacaacccaatcgaagaacgggccaaggacctgaagggacatttctctaaagaagacataaaaatggctaacaggttgatgaaaaggtgacatctaaaggtgacgacggagcaggtctcagccttagcaagatgacatcctgtcgccgttggcgacaacatggatgaaccttgaggacatcacgcaaagtgaaaaaagccaggcaccgaaggccagaggctgcatgattccatatacatgaggaatctaagagtgcagctcacagaagcagagtgagtggtggctgacgggggctgggggagggagtgagaggtgctggcccagggtgcaaagccctggtggtgcaggatgaggaagctccgctgacccgcagggcaaagggtacacagcgctgatgtgtgctgtgtgagcactgatgtgtgctgtgagtgctgatgtgtgctgagtgctgatgtgtgctgtgagtgctgatgtgtgctgtgtgtgcactgatgtgtgctgtgtgtgctgatgtgtgctgtgtgtgcgctgatgtgtgctgtgtgagcactgatgtgtgctgtgtgtgctgatgtgtgctgagtgctgatgtgtgctgtgagtgctgatgtgtgctgtgtgtgcactgatgtgtgctgtgtgtgctgatgtgtgctgtgtgtgcgctgatgtgtgctgtgtgtgcactgatgtgtgctgtgtgtgctgatgtgtgctgtgtgtgcgctgatgcgtgctgtgtgagcactgatgtgtgctgtgtgtgctgatgtgtgctgagtgctgatgtgtgctgtgtgtgcgctgatgtgtgctgtgtgtgctgatgtgtgctgtgtgtgtgctgatgtgtgctgtgtgtgtgctgatgtgtgctgtgtgtgcgctgatgtgtgctgtgtgtgctgatgtgtgctgtgtgtgtgctgatgtgtgctgtgtgtgtgctgatgtgtgctgtgtgtgctgtgtgctgtgtgtgtgctgatgtgtgctgtgtgtgctgtgtgctgtgagtgctgatgtgtgctgtgtgtgctgatgtgtgctttgtgtgtgctgatgtgtgctgtgtgtgtgctgatgtgtgctgtgtgagtgctgatgtgtgctgtctgtgcgctgatgtgtgctgtgtgtgctgtgtgagtgctgatgtgtgctgtgtgctgtgtgtgtgctgatgtgtgctgtgtgtgtgctgtgtgagcgctgatgtgtgctgtgtgagtgctgatgtgtgctgtgtgtgctgtgtgttgtgtgtgctgtgtgagtgctgatgtgtgctgtgtgctgatgtgtgctgtgtgtgctgtgtgctgtgtgtgcactgatgtgtgctgtgtgtgtgctgtgtgctgtgtgagcgctgatgtgtgctgtgtgagtgctgatgtgtgctgtgtgtgctgatgtgtgttgtgtgtgctgtgtgagtgctgatgtgtgctgtgtgcgctgtgtgctgtgtgctgatgtgtgctgatgtgtgctgtgtgctgacgtgtgctgtgtgtgcgctgatgtgtgctgtgtgtgtgctgtgtgctgtgtgtgcgctgatgtgtgctgtgtgtgtgctgtgtgctgtgtgagtgctgatgtgtgctgtgtgtgctgtgtgtgctgatgtgtgctgtgtgctgatgtgtgctgacgtgtgctgtgtgctgacgtgtgctgtgtgtgcgctgatgtgtgctgtgtgtgtgctgtgtgctgtgtgagtgctgatgtgtgctgtgtgttgtgtgagtgctgatgtgtgctgtctgtgcgctgtgtgctgtgtgagcgctgatgtgtgctgtgtgtgctgtgtgctgtgtgtgcagtgatgtgtgttgtgtgagtgctgatgtgtgctgtgtgtgcgctgatgtgtgctgtgtgtgcgcttgtgtgtgctgtgtgtgcgctgatgtgtgctgtgtgtgcgcttgtgtgtgctgtgtgtgctgatgtgtgctgtgtgagtgctgatgtgtgctgatgtgtgctgtgtgtgctgatgtgtgctgtgtgtgcagtgatgtgtgctgtgtgagtgctgatgtgtgctgtgtgtgcacttgtgtgtgctgtgtgtgtgctgatgtgtgctgtgtgctgtgtgtgctgatgtgtgctgatgtgtgcactgtgtgctgtgtgtgtgctgatgtgtgctgtgtgcggtgatgtgtgctgtgtgtgcgctgatgtgtgctgtgtgtgtgctgtgtgagtgctggtgtgctgatgtgtgcactgtgtgctgtgtgtgtggtgatgtgtgctgtgtgtgtggtgatgtgtgctgtgtgtgcagtgatgtgtgctgtgtgtgtgctgatgtgtgctgatgtgtgcactgtatgctgtgtgtgtggtgatgtgtgctgtgtgtgcagtgatgtgtgctgtgtgagtgctgatgtgtgctgtgtgtgctgtgtgtgctgatgtgtgctgtgtgctgatgtgtgctgacgtgtgctgtgtgctgacgtgtgctgtgtgtgcgctgatgtgtgctgtgtgtgtgctgtgtgctgtgtgagtgctgatgtgtgctgtgtgttgtgtgagtgctgatgtgtgctgtctgtgcgctgatgtgtgctgtgtgtgcgcttgtgtgtgctgtgtgtgctgatgtgtgctgtgtgagtgctgatgtgtgctgatgtgtgctgtgtgtgcagtgatgtgtgctgtgtgagtgctgatgtgtgctgtgtgtgcacttgtgtgtgctgtgtgtgtgctgatgtgtgctgtgtgctgtgtgtgctgatgtgtgctgatgtgtgcactgtgtgctgtgtgcggtgatgtgtgctgtgtgtgcgctgatgtgtgctgatgtgtgctgtgtgagtgctgatgtgtgctgatgtgtgcactgtgtgctgtgtgtgtggtgatgtgtgctgtgtgtgcagtgatgtgtgctgtgtgtgtgctgatgtgtgctgtgtgtgctgtgtgctgtgtgtgcgctgatgtgtgctgtgtgctgtgagtgctgatgtgtgctgtgtgtgctgatgtgtgctttgtatgtgctgatgtgtgctgtgtgtgtgctgatgtgtgctctgtgtgctgatgtgtgctgtgtgagtgatgtgtgctgtctgtgcgctgtgtgctgatgtgtgctgtgtgtgtgctgatgtgtgctgtgtgtgtgctgtgtgctgtgtgagcgctgatgtgtgctgtgtgagtgctgatgtgtgctgtgtgtgctgtgtgttgtgtgtgctgtgtgagtgctgatgtgtgcggtgtgctgatgtgtgctgtgtgtgctgagtgctgatgtgtgctgtgtgctgtgtgtgcactgatgtgtgctgtgtgtgtgctgtgtgctgtgtgagtgctgatgtgtgctgtgtgtgctgatgtgtgttgtgtgtgctgtgtgagtgctgatgtgtgctgtgtgctgatgtgtgctgtgtgctgatgtgtgctgtgtgtgctgtgtgcgctgtgtgctgtgtgctgatgtgtgctgatgtgtgctgtgtgctgacgtgtgctgtgtgtgcgctgatgtgtgctgtgtgtgtgctgtgtgctgtgtgagtgctgatgtgtgctgtgtgtgctgtgtgcgctgatgtgtgctgtgtgctgatgtgtgctgatgtgtgctgtgtgctgacgtgtgctgtgtgctgatgtgtgctgtgtgcgctgatgtgtgctgtgtgtgtgctgtgtgctgtgtgtgcactgatgtgtgctgtgtgtgtgctgtgtgctgtgtgagtgctgatgtgtgctgtatgttgtgtgagtgctgatgtgtgctgtctgtgcgctgatgtgcgctgtctgtgcgctgtgtgctgtgtgagcgctgatgtgtgtgtgtgctgatgtgtgctgtgtgtgcagtgatgtgtgctgtgtgagtgctaatgtgtgctgtgtgtgctgcttgtttgtgctgtgtgtgtgctgtgtgctgtgtgagtgctgatgtgtgctgatgtgtgctgtgtgtgctgatgtgtgctgatgtgtgcactgtgtgctgtgtgtgcggtgatgtgtgctgtgtgcgctgatgtgtgctgtgtgtgtgctgatgtgtgctgtgtgtgtgctgtgtgctgtgtgagcgctgatgtgtgctgtgtgagtgctgatgtgtgctgtgtgtgctgtgtgttgtgtgtgctgtgtgagtgctgatgtgtgctgtgtgctgatgtgtgctgtgtgtgctgagtgctgatgtgtgctgtgtgctgtgtgtgcactgatgtgtgctgtgtgtgtgctgtgtgctgtgtgagcgctgatgtgtgctgtgtgagtgctgatgtgtgctgtgtgtgctgatgtgtgttttgtgtgctgtgtgagtgctgatgtgtgctgtgtgctgatgtgtgctgtgtgctgatgtgtgctgtgtgtgctgtgtgcgctgtgtgctgtgtgctgatgtgtgctgatgtgtgctgtgtgctgacgtgtgctgtgtgtgcgctgatgtgtgctgtgtgtgtgctgtgtgctgtgtgagtgctgatgtgtgctgtgtgtgctgtgtgcgctgatgtgtgctgtgtgctgatgtgtgctgatgtgtgctgtgtgctgacgtgtgctgtgtgctgatgtgtgctgtgtgtgcgctgatgtgtgctgtgtgtgtactgatgtgtgctgtgtgtgtgctgtgtgctgtgtgagtgctgatgtgtgctgtatgttgtgtgagtgctgatgtgtgctgtctgtgcgctgatgtgtgctgtctgtgcgctgtgtgctgtgtgagcgctgatgtgtgtgtgtgctgatgtgtgctgtgtgtgcagtgatgtgtgctgtgtgagtgctaatgtgtgctgtgtgtgctgcttgtgtgtgctgtgtgtgtgctgatgtgtgctgtgtgagtgctgatgtgtgctgatgtgtgctgtgtgtgctgatgtgtgctgatgtgtgcactgtgtgctgtgtgtgtggtgatgtgtgctgtgtgtgcgctgatgtgtgctgtgtgtgcgctgatgtgtgctgtgtgagtgctgatgtgtgctgatgtgtgcactgtgtgctgtgtgtgtggtgatgtgtgctgtgtgtgcagtgatgtgtgctgtgtgtgtgctgtgtgctgtgtgcgctgtgtgctgtgtgtgtgccctgatgtgtgctgtgtgtgtgccctgatgtgtgctgtgtgagtgctgatgtgtgctgtgtgtgtgctgatgtgtgctgtgtgtactgatgtgtgccgtgtgcactgatgtgtgctgtgtgtgtccaccgcgctgtgggctcagaacccactgggagggtggagctcatgttagcatttcttaccatctacagacacgcaatataaaggggcaggaggagcctttgggaggcgatgaacacgtgcatggcctgatcacgataatgtcttcgtggacacactcatccacaaactcactgagtggtctatgttaggcatgtacagcttcttacatgccggtcacacctcaacaaagtggcttagaaaacatgctaaaagcaccagctattaagaaaaagattgataaattagactataataacattaaaatattttgttcatcaaaagacccatttaagagagtgaaaagaactggtacagagaagacatttgtcattcatataaacaataaaaattatatccaaagtataccaggaaaatccaacaaacctcaaagaacaaaacccagataaccccacagaagaaccggtgagagacaaaacaggctcttcacaaacagctggttggtgaaaagccgaaagggctgggactcccgggcacaccaggacatgcagacagacagggtgtctggtaacggggggtggggcagataaattgtggtgggtggaacacggccggccacagagaccagccacggagccaggcaggaaccagagccacagagaccagccacggagccaggcaggagccggagccatggagccaggcaggagccgtagccacagagaccagccacggagccaggcaggagccggagccacagagaccagccacggagccaggcaggagccggagccacagagaccagccacggagccaggcaggagccggagccacggagaccagccacggagccaggcaggagccggagccacggagaccagccacggagccaggcaggagccggagccacggagaccagccacggagccaggcaggagccggagccgcagagacccaccacagagccaggcaggagtcggagccacggagccaggcaggaactggagccacagagaccagccacggagccaggcaggagccagagccacagagaccagccatggagccaggcaggagccagagccacagagaccagccacggagccaggcaggagccggagccacagagacctgccacagagccaggcaggagccggagccacggagccaggcaggaaccggagccacggagaccagccacggagccaggcaggagccggagccacagagaccagccacggagccagggaggagccggagccacggagaccagccacggagccaggcaggagccggagccacagagaccagccacggagccagggaggagccggagccacggagaccagccacggagccaggcaggagccggagccacagagaccagccacggagccaggcagaagctggagccacagagccaggcaggagctggatgcagcatgtgccctcagatgccatttgcacgagtttaataacaggcaccccaggctgcaggattttggggtgctgatcttggaggtgaggtgataaaaggccctggctttgcagtacagtcaggagggtgggcgctgtgggcggcgagctgggctggggaagcaggagtggctctcgggtgggtgcaggtgctgcctcctgcctgattctccatttgggcatttttctagagccatggtgcacttcactatcaaaaacggtttccgacacctccatgagcctcgtgtctgtgccaaccgactccagctccgggctccctgcctctccacccggcactcccaccctctccacagcctgagccccacccagtcctgggccactgagccaccctcctgccatgcagggcagacacaaccccacacggtgctcgtcaggggaaggcaggagggcggccggagggaccagccacagttccgagaaggggctgaccgtggcctgtgatggacggggcacccagtgggccagaatcagacggagaacagctataagctgccacgccgactgctgtgggagctcctgggcctggaggagcctccctgggacacggtgcctgcagggccctctgtccttggacctcctccttcaaggatccacttcgcacatgtgcccttctgcaaacttccgtgacaccgatgcaaatttgctctttctgtatttcatgtaaaaaatttccactcacaagcaggagactccacgaggccttggggtcacaggaaggctcggagtgccagagtacagagtccaatttgagcattgttcaggttcaactgaccacagggagctgcctgcatttaaagtgagcaacgtgacgggactggacgctgcacgccagcaagtcatcgccacagcgaaggtcacggcacacccagccccaggagcttccccaaaatgcctgcaaccctccctcctgcacccacgaccctcccccaacttctcctgcagccccagcccccacccccaggaagcaacttacctgccttctgacttgtacattggtttgtatttcccaggcttttgtaaaaatgaaaccatccctgtgcactcccttgatccagcctctttccctcagcgtaatccttctgagtgagccccgtcacccctcggcgtaatccttctgagtgagccccgtcacccctcagcgtaatccttctgagccccgtctacgctgtcccacgcaccaacagctcgcccctcattgccgggcaggaccccaccacgtggccgcaccccaatgtgctcatcgcccactgggtgtccaggtgtccgtcctgtgggtgatggatctttctgtggtttcccggtttaggtcattgcagataacgctgctgtaaacatgtgtatgagtttctgcgggacgcgtgtctccttatctctttggtagatggagtggaatgactgcggcatacaacaggcctgctttaacttcttaagaaactgccaaactgtcttccaaagtggctccagcattcaccattcccaccagccgagtatgagggttccggttccacaccctcccaacacgcgctctggtcgactgtgtgagtttcacccattctaacaggtgtgcaggggtattccattgtggtttccatttgcatttccttgataattaatgatgtcgggcatccttccatcgtactttgtttgctatctaaatcttttctcgtgaagtatctgttcaaatcttttttagggttgtttctttcttattattcagttttgagagttctttatatagtctaaatttgttactgttatcagattcttccagtcttggcgtaacttttcattttcttaacaatatctttcaaagagtggaaattcttaaatttgctgacggtcataaagattttcttcagtgctttctgctagaaatgtgagggtctttggtctcggatccatttcgagctgattttcctgcgtggcgtgcggcctcgtttttgttgtgtttcgttctgcacttggacgtccagggactgcagccactcatggagatgcccttcctccgctcagcgtcctcgtccctttgccagccaccacccggctgtgcacctgtggcgtgcttctggttccccgccccatcccctgggtctacacggctaccgtcacgcctgcgctccactgtatcaatactgcacccatgtgacggggtcctgacatcaggtggcgtgtgccctcctgttttggctattataggggtcccttacatttttatataacttttagaataagcttgttaacttctacaaaaaaaaaaaaaaaaacatcctgtggagattttgactagaattgtgtggaatctatagatcaccttggggcaaggtgacaccttggcaatattgggccttctcatctaagagcatgatgtttctctccatttgttgagttctttaatctctctcggcaatgttttatagtatgagcgtataaagtcttgcaccttttgtcaaacttatccctaattatttcctggcttggaagctattgtcaatggtagtgttttaagttttaatttctgatagttagttatatagaaatgcaattggtttttgtaccttgacttttatatccttcaaccttgccaaaatcactcactagtcagagtagctttttctgtagattagactacattttctacacagatgatgagaccacctgcagagaaagaccacctagatgcttttccttttttcttcctgcctctctactccggccgggatctccagcgtggtgctgacactgcagtgagcggccctgcctggctgctggccttaggggatggcctcagcctcctgccaacctgcgacgctcaggggcaggtgttctgcagatgtcctttgccagctggaagaagccgccttcccctcctcattttctgagagtttgtattccgaatggatgttgggttttgtcaaatgcttttctgcatctattgcaatcatcagatagtctttattttttagcttatgaatgcggtgaattacattggctgatttttcaaatattaaattaattacccttgtatttctgggttaaaacccacgtggacataatataaatccttgtaacatattgttttgctccatttcctaacattttgttaagaatgttattagcatctatagccatgaggcatattggtccattttttttttttaatctcctaatgtctttttctgggtttggtatccggataatgccagcctcagaaaatcagttgggaagcagagtctcctcttttaattgctgtgggaggatgtgtgtagaaatcctctgggtatagatgttttttcttttctttttcttttcttttttctttttttttgagatggagtctcgctctgtcacccaggctggagtacagtggcatgatctcagctcactgcaacctccacctcccgggttcaagcaattctcctgtcttagcctcctgagtagctgggattacaggcacatgccaccacacccagctaatttttgtgtttttagtagagatggggtttcaccatcttggccaggctggtcttaaactcctgacctcgtgatctacctgacttggcctcccaaagcgctgggattacaggtgtgagccaccgcgcccagccaaggctttttctttgtgggaagattttaaactaaagattctattactttaatagatacaggcatatccaggtcatccctttcttcttgagcgagtttggaagtttgggtctttcgaggaacttgtccatttcatctaagttgttaaatttattggtgcagcattattcattatttactttttatcctctcttgactctgtagtgatgctgcctctatcatttttgatattgataattttgtgtctctcttttttcctgatcagcctgacctgactagaggtgtattaattttattgatttttctcaaagcacttgcttctggtttgtgtttctgtttcctgtgtcatagatttctgttcttattttcatcatccttgatgatgcttgtgttgaatttgctctttttctaatttctgaagatagaaatagcagccattgctttgcagccttttcttctttcctaacatacatgcttagttccataaagtccttcttgcgcttcagcagcatccacacataatgataaattgtgcttttgtcttcattcacatcacaatattttctaaatttccctccttttaatttcttcttttatccgtgggtatttaagaagcatatttagtttccaagtgtctgggtttttccaggcatggtttctgttattaagttcttatttaactccactgtggtcagagaacctactgtgggtaatttggaccctttcatatttttgaggcttgttttatggctcaacttagggtatatcttgtcaaatgttctgtgtgtgtgtgtgtgtgtgtgtgtgtaaagtgtacattcttctgccgtggggggaatgttacatcaatgtccgttactgatttgatgcatatttgttccatcactgttgagaaagggatgttgacctccccagccatcctcgggtacgtcttgattgttctgtggctccatgggttttgtctcgtgtgttttacggggatgttaatcgatgtacagacactgaggtttcacatcctcttcatgaattagcctcctcctctttacggaatggcccactgtagccctggtcacattcccaggatgaactccacctttttctaatttaatctcaccatgccaaccttctttggatactaagagataaggtttttccatcctttctttttaacttaccattttctttgtatttaaagtgggtttcttggaggaagcatattttgaacgctgaattttcatttaatcagatgatatttttcttttagttgggggtgtttagacacttaatgtgatgatagatatggttgggttgaaatatactatcttgctatttgtttttcttatttttcctatctgttctctgttccctttttttctgtgtttttttggattaagggtatgtttatgattccatttcatcttcttcgttatgtatttgctataaactctgtggggttttttgtttgtttttcttgttttgtttttattgattacttgaggatgtatagtttataactttatcacagtctatctccaagtaatattataccactttctccagaggatggagactttaaatactttgcttccattccctccctctcatcttttgtgctgtcgtcattcatttcacatttatgttataaaaccccataccattattattgtcttttgctctaagctttttgctcaaaaatattttaaagagattttgaaaataaaggcgttttaagtatttatccgtgttttcactattttcagagctgtctgtttccctggactcgcacacaggtggtggctgtcttcctgctgagggctctgcagatctcggagtggccgttccttgcagctctctccttccaggtgtcccgccctgcacgttgtagttgtcagtttcccagactccaaactgtctgtcctcaacttgcggagacccctgggctcttcctgccccccccccccaatgctgtggcctggaaattccccagagagtaagacctgggtgggccatggcgctcgccagccaaacccccttcgaggccccccgtcctgcgcggactgctcgtcaatgtttgaaaaccctcatttcatgtgcttttctctggtttttatttgtctcagctggaagaacgaatctggtccctgttacttcatctgagatggaagcaaaagtccaatcgatttatttttaattttatttgataccgaagtgcagaaaactgcacgtaccgcaagggtagcgctcggggaagcttcacaaccggggcacgtctgcacagccagcactcagtcacagaatgtcatcacccccgaatcccagccgaggtcagggccttccgcgcgctccctcgtgcttttcactgtctgagtgattaacggagaggctggctgtttactacacatctggtcccctcctttgaaacaggtatttgtgggggcaagaacagcgttaagtttgtcttccctgtgtgtttagcaccaggatactggcacatagcaggtattttataaatagttttgagtgtttatatatatacatatatattttatttttgacagggtctcactctgttgcccaggctggagtgcagtggcgccatctcagctccccaaagcctcagtctcccaggctcaaaccatcctcccacctcccagcctcctgagtagccaggaccacaggtgcacaccaccatgcccagctaattttaaactttcttgtagagatgcactctcaccatgttgcccaggctggtgagtatttatatcctacaaatatctttgaatgaataaatgcctagaaaaatgttgcaacatttgatgattatttcttgataggagctaacattgtttcatctgaaaaataatttaaatatttccattttaaaattacacattaaggtggctgagggcagttcctacctgtctcttctttatggaggcgattccacagcatttgaagagaaaattctcgtgacacagaggaaattgtcccttcatcgaacacagagagaccttccagtggcagctccaggagatgtctgtctgcgaccaggactatcttatcggcaacctcaggctggactgtgcctgggaaacagcagtgcagggagatcagctcctgaagacgggacccctcccacggggtcgcagggctccgtcttctgacttggctgctgggcgctgggaaaggctggcagcccgccttgactccatgccacctcctcctccagatgccccagaacggggcgaggaacagcctcccatcacgcctgtccctccacacgattctttttgttagcaagcacgtgtggtgtggcggggctgacaatccacccacgcgaaggtggctgtgctgggttccgtggtgctctcaggaggcttggcacagagcctcctacccagagggctggtccagggctgtgcagagaaccttccggggacctcaggcgcagggaggcctcaggggaaggagcagcagggcttgtgggactcctgggttcctgaccccccctggcgttcccggatgggtgggtggatcccaaccccacctcttctggcgggatgagctccccaggctgagtggccacgcccgccccactcactgtgttgtcctgtggacgttttcctctccttgtctttgcccttcgacttccctgaatcggcaacaaccgcaggtgtctgcactctgaaagtcaggttatatattcgggtttaagaaacagagataacaaacgcttggaatataggcgacacctgctcagcctgtttcactctaaggcagcagcaccacgaatccccacgctcacttctggggatggtcccactgaggtggggccgggatgagccacaggattttgggatcatctctgatccaccagccaagctaaacggtgccaggtgtccgtcccctctgccttccttcccaccccaaatcaaagcagcccgggcggtcccttggaggtgcttgccctcccaccccacacttgggccaggggctggagggaccgtgggcagtgggcagtgggcagtactcctccaggcaggaatggaggcagaaccagaagaattgcttcctgggagcaggcaggcggcgccgagtcctgaacaaaggcggccgagaaggcacagcaagcacacgtggttggccacagcactggacacacgtgtccatgcgtgagcgtggtggggtgccagcctcaacgtcatccccagtacctggccttggagaggctgagcagggggaatagcggctgcagaagctcctccaggggccccaggacgctactgagcctctgcacagggcgctccttctcttccacctgcaggccttctggttcctaccgcaatccaaaaaagaggcccccgtagcaaacagggcgcatggcccagaccccgcgagggccaggcccctgcagaaaggccgagctcctgccccttctgcaaacagcatggtggacaagggcacctggctcggcaacgagggccccatagcacctggcccatcctctggagggtcaccctgagaccccagcccccacccatctcctctgcccgcaccacggagggtcctgcctgtggggacagccgggcccaggtgaccctgagctctgcggagcagagtggaccaggcccctcctgtttgtgcttcagggatcagacatggccaaggagcccaaggagcaagttctccccccacatggagcttggcctgggagttgggcagtgcccgggtgttgggatggcccaagcccttcagcagcctggcctagcgccccgcccctccccccacctcgccagggtcctggctcccaggggtggggagcagagggtcccggctgggtggcttggagcctggagggcctcaccgagcctatgttcagggccatgtcctcactgtacacctgggcctgggtctgcttccggaactgctgggcacaggccagcaggtgggagaaggcagtgggacttatggccagacgcatcaccttgcaggagcctgtggggacatggacacaccctctgtcgctgcccagggctgaggatggcagctggaccgtgcatggtgagcactgggaaaagggctgctgtcccacaggaaaggctgcatggatggaagtcccttccttcatgtggggtccccctggtcccatgctgtggagacgctgccacatcattgcgcaggcagcggatgggcctcctgggccccagggaagcacacgccccgtctacacctgtttccagaatgtcacaggctctacagacccctccatccctgtgggtggagggctgggagaggccacacccctgggaccccagcggctccctggtgggccttcagcttctggaaggaaagggcccgtgtgcagggaacctgaggcacagtgggtatcagctctgctcccgcccccgctcccctcccgaaaccactcccctcccgcccctgctcccccttccccatgctcccgtcccctccgctcccctccccctgctcctgcccctgctcccccctccccccactcccctccccacttcccgtccccgctcccctccccttctcgccctgctcccctccccctctcgccccgctccccctcccctccacctctcacctccccctcccgacacagccctgctcacctccccactctcgcccatgctccgcctgccctgctccccctccccctcccctgcagccctgctcacctcccaccgcctgcacctttcctttggctgcagtaatgaacttgggtttctcgtaggcagcgccgtacagacgggacctgctggcaggacgtgggccagggtcgcaggcaagccatgaaggaaacacacctcacagcccagctccagcgacctcagaggagcccagtgaggccaactctgcagaccatggacgcccagcagggccctccccgtgtgcgcctccaggggcaccgctgggtgtgcatggccggtcaggacgtggattgagaacacgctgggtcatgcaccgggcacttggccacggccagtgagttctgtggtcactgccagaggcaccgccggctggctccaggccagtgggagctggagaggacagctgtcctgctctcggctccaccataacagtgaccttcgggtccggacgcccagaccagacacaaagaccctgtactggagacaggtcacaggaaggggtgtgtggcgtctctggacggccccccccccttggggtacccggtgtctgtccggcaccttcttgggactgtccgggcgtttcccgagtcccaggcctccctggggtggggctgaggtgtgggcagcccacggctgggtctctgcctccctgaggcctctcagcgggctgggggcggcctcaacaagaaggagcggctttacctgtcccctgagaggtgcagaaagaggatccaaaaggtcggaggcatctcattcaagaggttaaaatgctgctcagtgacgcagagattttgccaagcctgtgtggcgaaaaacggccatcaggggatgcatttaggacgcaaggacgtcgctgtgctgttcccctcatttccaggagacctcgtggcagagccacggcgggggctttgtacccttcctgcccgaggctgggcccttggggtggggggccctgctggaagtgactcggggctgccaccagggggcagcagaggcacgcaagagtcaccggcggccccaaaatgtcatttctctccggttgttaatgtttagaaacctgatttgcatgacgcaaagtgcatgttcaccaaacccaaaataacaaatggaaaattctccagcgccgcctctgtgagtggtgcctttccctccatccttctgtgtcctccacaccacacatggagacatacatgtacagacacatggatgcatgcagacacacacgcgtgcacagacacgcactcacgcagacaggcacggacacacacagatgcacgtgtacatggacccagacacagacatgcacggacacagacacccacccgtgcatagacgtgctcacgcggacatgcacagacacacacatgcacacgtacacagatgcacacagacgcacacagacatgcacagacacacgcacacgtacacagatgcgcacacacagacatgcacggacacacacatgcacacgtacacagatgcgcacggacacacgcacacgtacacagacatgcacggacacacacgcacacgtacacagatgcacacagacatgcacggacacacatgcacacgtacacagatgcacacacacagacatgcacggacacacacatgcacacgtacacagatgcgcacggacacacacgcacacgtacacagatgcacacagacatgcatggacacacatgcacacgtacacagatgcacacacacagacatgcacggacacacacgcacatgtacacagatgcacacacacagacatgcacggacacacacagatgaacacatacacggacccagacacgcagacatgcacggacacagacacgcacgtgtacacagacgcacacactcacgcagacatgcacggacacacgtgtacacagtgcagactcagagccgtgcccccatgctcccctggggaaggccctctcttcctggccttaggcccctgggatgccagtcggctgtggtcaggtggtgcaggcagcagctccggcccgtccgctcccgtggactatgagtctgtctaataccagacccggcacgcagttcaggctcctcaccaccagcggcaggcggccaccacagcccctgagggccagccagagggctcctggaggcttgggcctctccgcatgggcagccctccatcgagctgtgaggcttctggttctgagtcatagcttcaagtttgcacaaacaaagcagtttttataaaacttactatcaaagtagaatatacagaaagtggcgtaaaagcccatgcgtgaaaagctcgatggatttttgcagtgggcacacctgtgtggccaggcaaagagatgggacattgccggccactggccctcgtccccacaaggggaccacaacagattctagcagctcaggtgggcttttctgccgggcctctggcttgcgccgtgggcttcacccaggtggagcgtggggctggccttcctccctgcagatgccacagctggtaatgccacagctgggaatgccacagcgtcttcatccgttctgtggccaagggcatctgggtggcttcccgtcaatgggggtcatgagcgatgctgctctctggggaccccagcgaaggatttctaccgggcgcagagtcaggtgcagacttgctgtgtcagctacagcgattctgccagaaccctgcccaggggctgctgcacccacgggctactgtgccaaggggcaggcatgaggcccagggagcctcagctgcccccatccccgtctcatccccactggccgtgtcctccttttccatgggagccattctggttggtgtctggttatctgcgtcaggcttcaattttgcatttccctgactaatgaacttgagcaccattaaaattattggccacacgaatctctgcttttgtgagattccaacctcgtgccatcttcaatcagtgtctccttttcttactgaaaagggacctacacccttcatccatgtgggacacacatgtgtcggcaacctagtgtcaatatcttctcattctctgtggctgccccttgactctcggcagggcgtttttggtgaacagaacttctgaatttcagcgcagtctgatttgtcgtttttcccttgtacggctcctaccctgtgtctcccgtggccacaggggggtggcgcagccccaggtccccacaagggacacagccctgggccacctgccaggccatctctgtggaaaacaacattgctaatagctcaggggaaccaggctaagacctcaccggaaggaggaagagccttcgtgaaccctcggccacagagagaactggtggcttcatggcacggagcctctcggcccacacacacggaacagcacccgagttcttcagtctcttggttctgtattttcttttcagtctttctacatgttatttctttttctagtcatattgttctgtattcaatacaagtgctgatagggtgtgcatttccgctcttggggaaaacttttcaatactgtaccattaaatatgatgcatgctagggctgtatagatattctttattggattaaggacatttgcttctatcttaattttaaaaatcatgagttgatgttggattttgaaagacaccttttttgcacctgtcaaggtgattttgcgatttgtctccttttccttctgttaacatggtcaatgatatcgaatgatttttgaatattgaaccacatggaacacaactacttcaccctgacgtggcgccccttataactgctggactttatttgcagtattttgttaggatttttgtgtattagtgatgagagagcctttcctttcttgtaatgtccctgctaagtttctagtgtcaacgttcatctggcctcttagtaaaagaggaagttgtttgctttatttctactttctatgagttttcagaggttatttattcttccagtttttggaagaatttactggtgaagccagtggggtctgggttttctttgtagcaacattttaaataagagattcaatttctttaacagacaccgaatcatttggattttctacgcttctgttggctttggtgagctgtgttatgttgaggagttggtccatttgagtccggtgttgcctgtattggagtaaggctgtcaagaacattctgtgtgaactttcaatgcctgcatcatctcagggatgggtctttttcttactgatactggaaacttgccttttccctttctttcttgagcaggtgtttctccatttcattgtcttctctttggaaccaacttgtgccttggatttcctctgctggttttggcttcgctgtttctgatgttgtattgatttgtcctctttcatttttcttagctgtaatttattgttgttgtccagcttcttgaaatcaaagcttaaatcaaggtgttttctggctttcttcttgtatgcaaggctgttatttttcctgtaacccgtttgagctaagtcacgtaagtttttatttgtagtattttcattctctaagtcagtttaagtctaagtcagtttaaagtgttttctgaattctgctgtgacttcttctttgactaatttgatcatcgtaagtaactgtttaatttcaaggtgcccgtgtttctcacaggtccatttttgttactgatttcctgctttatgtcaccgtggttggaaaacacgctctgagtgaccttggtactggggatctctgctgtggctgtgtgtggcccagcgctgttcggttttagccatgtctggtgagggccttctcgcaggtggggacaccatagagtccggggtggcacagggcattccgtggcgagggggctgagtgtgccagctcaagtctctcctcctcttcctataaagccacagtcccgctcccaggataacccctgaatctaaaaccattaattagatcaatccattcatgagttttggagggaacattcaaaccatagcattctgcccccaaaactcatgtccttctcatatacaaatagattcctacaaaccccgtagccccaaagtcttaacttgttccagcagcaactcaaaagtccgaagttcagtcttatctatgagcctgtgaaatcaaaacaagttctctacttccgacatacagcggtgggaccggctgagacattcccacttgaaaacgggaataggcaaaatgaggagtggaggctcgaagcaagccccaaccccacagggctgatgtgatcctgaattcagggaatggtctcttccgacagcacctgctgcctctggacgcaggggctgggggttgggcctccccgatggctttgctgggtgcagcccacatggctgctcttatgggtgggagtccagtgcctgaagcttcccgagctgccagtgactccacagctctggggtcctggtgggggtcctgttcccgtggctttgctctgctggggctgtctgtggtggctccatccctgggacgagtctctgcccaggcctccaggctttcaatggcatcctttgaaatctggatggaggctgccaagcctccatcttgctctctgcaagcctgcagaatcagtgccacgtggccgtggccaatgctgtggccacaccttcttgagctgtgggtctatctgcaccagagctgcctgagccacccctggggccgccatggagagctgcactggaatttagggagcatggtccccagcaggccctgggcagagagcctgtggagggcacctctggcacatccaccagtgcaattctgccctccatggcctccaggcttgcaatgggagggcagccttgaggatctctgaaatgacttctgggtctttcttccactgccttgaagaacagcacccggcccttcctctctgtgctgacttttggtgaacggtctagagccttggctcctctcctgggcacacctttcactctttacgtggccaggctaagagcttccagatccttccgctcacttttcttttgatgataattccatctccgagttattttttcccttttgcagctccgtgtagtggttagaagtagccacgcagcagcctaattctttgctgcttggatatttattctaccagatacccttgttcaccactctgaagttcagcctttgacaaagctgttccacgtggacagttcagccaaagtctttgctaatttatgacgaggctggcctttattctaggttttaataccttgctccacagttccatctgaaatctcatcagaatggcctttcctgtccaaatcagcattctggtcacgaccacttaacggatctctaaagagttccaaactttcccttgtcatcttgtcttccaggcaggccctcaccagaatcaccctcaatgatccatttacagacatactgggtttttaaaagccttctcctctaaatgctttcagcctctgctcattactcagttccatagctgcttccatattttcaagtattcattattgttaaccaccccactcctggtaccaattttcttagtccatttccagttgtttatagcagaatatctgaaactgagtaatttacaaagaaaaggaaattatttcttacagttctggaggctgagaagtccaaggtcaaagggccgcatctgatgagggccttcttgcaggtggggcctctgcagagtcctgaggtggcccagaatgacacacggtgagggggctgtgttagcccaggtcttttcctcttctcatacagccatcagccccactcccatgataaccataatccattaacttattagtcaacaaatgggctgatccattcatgagccctcatgacccagttacctcttaaaggccccacctctcaatactgccacattgggcattgtttcaacatgagtttcaagggagacaaacgttcaaatcatagcacccttgctctgtcttttccaatgtccccctcagacagggtcttttcttcagtctgtttctcagtcacagattcaaccttgggctgcattcacttttcccagaaacccccacattgagcccttcatttaggagagcacatatgggatgctgcagaggacactatgtcctggaggctgcgtcctctccaggcaccacaagaccacagcagatttcactgccttccagaagcttccaggggaatgtccctaaggcccaggacctggtgggtgttcccagggtgctgtggggctgctcctggtgggcattcccagggtgctgtgggactctgctctcagtgggcgttcccaaggtgctgtaaggctctggtctcggtgggtgttcccagggtgctgtaaggctctggtcacagtgggcgttcccagggtgctgtagggctgctgctggtgggcgttcccagggtgctgtagggctgctgctggtgggcgttcccagggtgctgtaaggctctggtctcggtgggtgttcccagggtgccatggggctctggtctcggtgggtgttcccagggtgccatggggctctggtctcggtgagtgttcccagggtgctgtggggctctggtctcggtgggcgttcccagggtgctgtggggctgctgctggtgggtgttcccagggtgctgtggagctgctcctggtgggtgttcccagggtgctgtggggctctggtctcagtgggtgttcccagggtgctgtggggctctggtctcggtgggtgttcccagggtgctgtggggctgtggtctcggtgggtgttcccagggtgctgtggggctctggtctcggtgggtgttctcagggtgctgtggggctgctcctggtgggtgttcccaggatgctgtaaggctctggtctcagtgggtgttcccagggtgctgtggggctctggtctcagtgggtgttcccagggtgctgtggggctctggtctcggtgggtgttcccagggtgctgtggggctgtggtctcggtgggtgttcccagggtgctgtggggctctggtctcggtgggtgttcccagggtgctgtggagctgctcctggtgggtgttcccagggtgctgtggggctctgctctcaatgggcgttcccagggtgctgcggggctgctcctggtgggtgttcccagggtgctgtggggctctcctagctgcagcgcagtgacctctcctgtcctggctgcaggctcgctcctcctcctcgcagagcttctgttgacaccagtcccagctgatttccgaattgcccagtggccccaggatggacggtgagggttgactcaatgctctcagtgcaaacattttagcttagctagttctcattgcttccacggctgataacttcaaaaatatgaggctctgccattcgccagcctttcccgaggctgctgcggtgggcctgctgtggtctacgacatcccccagcccgactgcactgagtctgtgcctggctgagattcggtgcagcttttccatgagaattcctgaaacaggagggcctgaggagtggtggcccccatcgtggtgactgatggctcccacatgtcaagccccaggccgcctcctggccctgcactcagtcctgcacacacactggtgtccttggtccccaaagctcctatggggtgagctctgcctggtctgcagccgtgcgggagggagagccatgactcccgtgcccagctcacccacagcaggtgctctggtaccagcctggctgcttgctcctcacctgtccagtaagtgctgcccggggcagcccaatttttttgagatggggtctcactatgttggtcaggctgggcgtcagtggctattcacaggcactatcatggctcactgcagcctcgaactcctgggctcaagtgatcctcctgcctcaggctcctgagtaactaggactacaggtgtgtgcccccatgtccagcttaggccacaggcacccccctgcatgcccagcttagaccacaggcgcccccaacgcccagcttagcccattttaattcccgcttgccatgcacaccctcctggacccagctccggcagggccatgtgcatcagcatcttcctccaggcgcagggccaggctgtgccaccttctcctgtcctcgggcctgggctgggcctgcaggccccttgcctccaccctctgtcctctcagcttcagaaggacggcagctttccaggtttccacctctgggttgagtcaccagttctcagccggggccatgttgcgcccactggccatgtctgcagacatctctggatgtcacaatggcaggggtgctcctgtcagccagtggcggatgctgcccccgccccaccctcaccagcaaagcattgtccaccaaacagccctggacgaggggatatttggtcaggtccaccccaacgagaggaccagggaggcagccacgcagccgaaggagggaggggccccattaggccatgcttgtctgtttcccacaattcaagaaatgtcgtcgtcttttttctttaaatactgccattcgcatctgctaatctgaacaaaaagcgccgttagctgtcctgctccacagacatgtttctcaaggttgaacccttagacctgaccaaggtgtaaaatatttccttaaacggaggcagggaacatgcagctccgatccacatgaggccctcagggcactgctggcccatctgctggtcagctcttggctgcaggcctggctgtgcgtttgtagttgtgacctcgccaacctcaccgcacccaccacgtgggccgttactacccccacaaggaccaggggacactgaggcttggagaggcgacccaggtgcacatggctgggggcacggggagggatggctcatgagctggggggtgagcaaggctgcctcgctcaggcgtgggactgtgcggctgcagtgtctgtccacagagctccagagctgggggcaggttcagcggcatccgtgcccgcttaccttggacacggcggccagcctctgctccacacgggcgcccaggctggtggtggtcctgtcttggcaccggagctggtgctgtagctgcagcagggccgccagctgtgagctgctggtgttggctgtggctgcaagcaggacatccctcatcgtctctgaggccgagcagctctgaaagggagcaggggaggtgtaccaggggcccgaggcctgggcggggaggccttgcaccctgcggagggtgcgcagcagctgcagcctgggagcaggagtgggctggctctcctggcaaggctcccctgggatgctggctcctcctggcacctgcagagtcgcgtggggccacgcttgttccctctgtgggacctctgtgaggtctgcacggacagggcactgctggcctgtgactgccgggtctctgtgtctgcccaatcctctgtgggacctctgtgaggtccacacggacagggacctgctggcctgcaactgctgggtctccgtgtctgcccgatcctctgtgggacctctgtgaggtccacacggacagggacctgctggcctgcgactgccgggtctctgtgtctgcccgatcctctgtgggacctctgtgaggtccgcatggacggggccctgctggcctgtgactgccaggtctccatgtctgcccgatgcaggggatcggggataagcacacgaatgcatgttctctctgagccacaagtttacgtggccggcaggctcccactgcttaaggaccctggcctgcggcctgcttctctaatggagtccccccaaggcgagggccccagctgaagcccagggtcctccctcctccatgaagggcctggctggaggtgggcagggcagagacacacctgagacagagccaggaactggcaggtagttgcagggtccagggtgccgacacactccaccatctccaggctggcggctgctgcgacatccaggaggccactgccaagggccacctgtaggcactgcagcagcacctctgacgcctgagccaggtactgctgggccagaaccatcctcctctgtggggcacaaggctcaggctcaggccaggctccgggcagaggccacacgaggggcaggaggggcagccgcaccttcaggtcctcgcctctcctgcagtgctcctccggggctgccctggaggccggcgggtccctgctggactttgtggcaccctcttcctctacctccagctccagagacttgaggccgctcagcttggcgcccacctgtgacacacattgcaggttggcagacacttctgggttcctgcttggtcggcgtggggagggcccacccagggaggccggggtggtcgggctcctcagcagggtccccgggtagggggtaccgcaggccacagcatggcctctcactatcccaaaccctccatccctgagttgatgcagggtggccctgacccgtgagcctgggcaaggggacgctggagcctgggcgaggggatgctgcagccagggtgaggacgcagacccctgaggaagccggcctgagtcacgtgggcctggaatccaacacattcccagggggctctcgttcctgtcctttggaaacacctctcccggaaccagccagcactgaggctgaggcatccaccagccctcaggggcccctgatctggctgagacacaagccccacctgggtataggaagccctggcagcccctgaagaacctgggttgagagggagccccctgggttttcgggacacaaggtatcgcagcaccaaatctatatatgcacccaatgatcaggcgtcaaaataaaaacactgatagaaatggagaaggagtgatggacatgtccccgttctagtaggctgcctgaatgcaggcaaaaaccagcaagcacgctggaggcagggcagccgtggccacctgacacgcacggctgcctgacatgcacggagcctggcccctttctcgacggagcacacgccgttcagacgtgtgcagaacatttaccaaaaccaaccagggctgcaccacgtgcagccactgcagagtccccaggaccgagaccactcggtgtgttttcaaccaccaggacattaaacaggaagtcagtcatgaaaatagacccgtgagaaacagtcgccttgaaattaaacaagatacaatcatcaagtcagtcaaacaagaaattgcaatggaatttataaaacggacttagagaatgaaaatactgagggaagagaaaaggaaaagtcagtgaggccgacagccaaggctggtctttggagaaacagcctgaaatgtcacagccacaggcagagagagagctgccaggcaaaaccaagctgcggcagcactggtgagtcggggggagggagggcagcagagaagccttcgttctccaggtcatcagccggctgccagggaaagtttcctccccttttcaggcatgaacacggtgggctccgagggaacctgcatgggttgtgggagggggtgggggcttatccaaaacacacccacagctgcacaaacaagagaggctgcgctttgtgctccctaaagacacacccgcagcggcacagataaggaagtcacaagaacagcgaaagagaccagcggactttcttatcaaagcgtttggattcaactgtgaaaatggcagcccactcgggccccctctccgccacagagagcttttttctttcacttattaaactttcgctgcaacttctccctgtgtccacgcgccttaattttctgggttgtgagacgatggacaacgagctcggataacaccttagacaacgtgaccagcaaccctagaccgtgtcgatcctacgtatcaaaacttgggagactaaaacgggggttagaggaaaaatacagccttgaatacaagaaaaaacccagaaaaaccttgatttaagctttgatttcaagaagctggacaacaacataaatcatatctaaggacagcaaaaggcaggtacgtcccggcctggcctgcatggggcgggggccgcggaagaaccctgcgccctccacacgggacttgacgtctgctctgccctggcccctcctcgctggagcaccatcagcagcattcatggatgaggacgcagctcacaggaggccctgccgaccctcgcttctggtccacacccacccgctacctgagcaggccaatggaggctggttgcatgcagagcctcgattccatcaattcactcgaggtacatcaagtcctgtgctaggtcctgaagacgcaggacagacatttcagggccgacccagggctgcacggcacctggtggggggattgccctgggcatggagccaggcacatatggcgtggttgctccagtccctgagggcatcttccttaggagctggtgtgtggggacgagcccagcttctctgctggggcaggtgccttccgggggaggagctggcatctgcacaagtgtttaggaaggtgacctggggccttgcgtggcttgtaggggccatcaccagggtcctgagggagcaggtcactcctgcagctgactcagcccagctgggcagccttgcagccttctggagaagggtgggccctgggctgagagtgaagaaggtcccgaccgcccttctcagagccacctgggcatggaggcagcagcctccctgggctgtagggggtgggggatggaggggagccaaggctgcctagggctggccctgctgtgcactggcatgggggccacggcgcccggtgctcaggcccaccctaggccgctcctgcagcttctgagctccccaggtccctgtgcggggcctggccagagccgctgctgcgggacacaccagttgcgttgctccacgctcgccagcacagggcttgattggggcgggccgcgtgctggggcgggctggctctgtgctgctgtgggccgacccaagtgcccgcctgccctccttgcctactccacagacactgtgtttccctcccaggtctgttccggaaggcctgagttttgccagccccatttcttccctcacgcctacttcctacatttttctctcttcctggggccactgctgcaatcacaggagtcctaaacacttcgcttgtgtttttcaggcacgggtgactggtgttggagccagacttgggatagaagcaggagcacctaccgaggggcccgcctcccagtagcaggtagggtgcacagggtcagcttgcatggccagcaggtgcagggccctcccggccaggcccaggagccgggcgcggatctccacacagcccacgctcagcggctgcaggctccccagctgtgccagtgccccgtgtgctagagtccgcttcagcgtgaaccattgcttcgaaaagacagacatgttacagctgccaccccaagggcaaccgcccaccctgcccaggggacccagtgagcccgccctctgctgtgccctgtgggtgggaacactggggagctctgagaaagccttgccccgcagggagggtctccagggctctggtgtgggggtcacagacgtctgctcatagaaccttaattcagagctcactgacaaatcagttttaggcccgtctttggtccatttatacttatgtaaattaatttgagtcatgtttcatgaagtctcagaaaactcaaaatggaagaatgtatatttccctcaaaacattctacatattcaacttttttttttaccaaaatggagtccacctctattgagctctttaatccacatatgcattaattattaatacgaattaattagagcaaattcatgagtcgggaagggcagctgtgggtcatataggaaacacccctgcaatgggacctcgatttcatgagccaattcagtctcctcaaatggtgagacaatgcccgggagctccccctgctgcaagaggtccccagctgacccgcaccgccaggtgcacagtggtggagacggctcctgctggaacgggggtcccatcagctgcactgtggcctggcgctccctccaccgggaatctgtgaccccagcaattaccaggccgacggaagtgtagtcactggtgttctgcagatagtccgccagcagcttctccagggacccctgctcactctgctgcccgtgggcctcctcccagatgaactggagcatgtccagagccatttccacgaggccgagcttgaggcgcgccagcttcctcatcaggggcgtgttgacgttctgcaactgagggggtcaggcatgcctctgaagcatggaagcttctggtaagcctgaatctacatccccacaacttggatgaggcataaccgacgtaagaaactcataacaaactgcgcagatctacagtggaaaactgacacactttgatcacgaatacacccgtgaaaccatcaccaccttcgagataatgcagtagcccttatccccaaatctcttcgcgtcccctcatgttccctcccggtcacctagctgcctgccggcaccctgcattccttggcattttccagaaccgtacctaagtggaggcgcacagagtgctgtctttccgtctggttcattttcctcggtaaagtcaccgtgagactcccccacgcggctgcacgcatgctccttccctctcacagccggcgtcggtgcaccgtgtgcacgcgccacaccctgcttatctattcaaatattttatttccagttctggggctactaccaataaagctgctgccaacattcatgtgcaaggtatccacagatcctgatccacagacgtggtatgttcctccatttacttaggaattctcagatcctgatccacagacgtggtatgttcctccatttacttaggaattctcagatcctgatccacagacgtggtatgttcctccatttacttaggaattctcagatcctgatccacagacctggtatgttcctccatttacttagacattctcagatcctgatccacagacgtggtatgttcctccatttacttaagaattctcagatcctgatccacagacgtggtatgttcctccatttacttaggaattctcagatcctgatccacagacgtggtatgttcctccatttacttaagaattctcagatcctgatccacagacgtggtatgttcctccatttacttaggaattctcagatcccaatccacagacgtggtatgttcctccatttacttagacattctcagatcctgatccacagacgtggtatgttcctccatttacttaggaattctcagatcctgatccacagacgtggtatgttcctccatttacttaagaattctcagatcctgatccacagacgtggtatgttcctccatttacttaggaattctcagatcctgatccacagacgtggtatgttcctccatttacttaggaattctcagatcctgatccacagacgtggtatgtttctgcatttagacattctcagatcctgacccacagacgtggtatgtttctctatttacttagctattctcagatcctgatccacagacgcggtctgtttctccatttacttagacattctcagatcctgatccacacacatggtatgtttctccagttacttaggcattctcaaattctgatccacagacatgatgcatttctccatttacctaggtattctcaaatttttctcagttatcttttgtagttctcagagtacaagttctcacatttttgggacagatttcatttttaaatgctgtcataaaattgtttcaaaatttttaatgtctgattatttctagcatgtagaaatatacaactgatatctgcatattgttcttatatcctgcaaccttacaaaactcagcattagtagctttattttttggtggattgcataggactgtgtatgcagacaactatgttatctgtgaataaaaacagtttcattccttcctttccaatctggatgcttttaatttccttttttcctgccggattccataggccggaactcccatgtcaacacggaacacaggtgagaagagggcacatcctcgtcttcgtccttatcgaaagggggcatcagtctttctcccacaattgtgacgttagctctagctttttcatagatgtcctttatcaggttgaggaagttttcctgtattaattgtttgctaggagtgtttaccaggaatgggtgttgaattttgtcaaatgcttttcctgcatccacaaagatgatcatatggtttttgttagttttgaaaaaatatggtgaaattaattaatttttgaatgttaaactattcctggggtaaccttggcttggttatgatgtattatcctttttatatattgtgggatttaatttgctaaaattttgctcacaaggaatgctggtcagtagctttttgttgttgttaatgtttttatcttgttttggtatcaaggtaatatttgtatcatagaaaaagtgggatgtattctctccttttcaagtttctagaataatttgtgtagaactcgtattattttttcttaaatatttggcagaattcactagtaaagccatctgggcttgacgtttcctttgtgagaatgtttttaattacaaattaaaaatttaaaatatatagggctactcaggctatctctttctttttgagtgggctttggtagttcatgctttcaaggaatttttccatttcgtctaagttggcagacatattagcataaagttgtttgtaatatgattcccttatcctttcaatatctgtagaatccatggagaaattgtgtctctcatttctgatagtggtaatttatgtcatcttttttttctgatccgtctgactagaagtttttcaatttactgatcttttcaaagaactagctttggtttcattacttttctcttttatttttctgttttctatttcactgatcgattgcccctcagatctttaatttttattcctctgcttatttgggaactgagtttgctctttttatagttttgtaaggtgcaggctgaagtaattgatttgaatcttttcccatttctcctacaggtgtttagtgctgtaaatttccatctcggtattgaattggcaacatcttaaacactttgataggtgtttttttattcccttcagttcaaaatactttcccccttgatttcttctgtggcccacagttattatgacatttgctatttatttttcaaatctttggcatttcgtgcatacatagctttctgtgttttgttttgttttgttttgttttgttttgagatggagtttcgctctgtcgcccaggctggagtgcagtggcgtgatcgccactcactgcaagctcttcccccccaggttcacgccattctcctgcctcagcctcccgagtagctgggattacaggcgcccgccaccatgcctggttaattttttgtatttttagtggagatggggtttcaccatgttagccaggatggtctcgatctcctgacctcgtgatctgccctcctcagcctcccaaagtgacgggattacacgcatgagccactgtgcccggccagctttctggttttttttaattgaggtaaaagtcacataacacaaaattaaccgtttaaaaatatacaattcagtggcacttacacgttcacaacattgtgccaccatcatctctaattccacgacattttcatcactccaaaaggaaacccctcgcccattaaaaaatcatcccttatcctccttgccctgtttctatggatttatctatctctctgtttctgatttctaatttagattgtggcaccagtacatattttatataacttaaatcttttaaaattattgagacttgttttatggtccaaaatacagtccatcttgaaacatattcatgtgcacacaaagagcatcttattctgctgttgttgggtgaacgttctagaaatatcttcaggtcatattggttggtagtgttgttcaaatcttctagtgatttgctgattttctggctacttactctattaacactgagagagaggaactgaaatctgactgtaattgtagagttgtctatttctccgttgcaattttattttatcagtttttgcttcattgattgtgaaactctgttattagctacagaaatgtttgcatttatagcctcttgactggttgagccgtttgcactataaaatgagtttgtttatccttggtaatattcttttttccaaaatcggctgtgtgtgttgttaatatagccactccagctttcttttcattagtgttagcatggtacattttttccattcttctccttttaacctatttatgtcttaatatttaaagtggctttcttgtaggtagcccatagttgggttttgcttttttatataatctgatagattcttttaactgagggtgttctgattatttaaatttcatgtgattattccatgattaggtctaaggttatcatcttgctgtttattttctgttggtctcacctgtcctttattctttttcttttttctgctttcagggggacaaatgaatacttgttatgatttccatttatctcctttcttggctcatgcagcatacatctgtattctggtatttctgtggctgttttggtatgtagtgtatgatatcacttcacgcagagcatagaaaccttgcatttgttactgacctcccaatctttatgctattgttgtcgtacatttttacatgttagagaccccatgctacattgttattattgtttaagcagccaattatcttttagagtgatttttagaagaagaattggacacaatttcccctggagtttacgtgttcgaggctctccatgcacctgtgtggatccacacttccagtgggtgtggcttccttctgcctgcaggactgactccaagagctcctgcagggctcagccactgaggacgccttccttcagctctcgagtgtttggagaaacatctttatctcactttcattaagaatcatattttctgggtacagaattccaggttggcagtgtttcctctcggccttcacagaggtccctgcgctgggctctcagctacactgcttctgcaggaagctgcgccattcacctctgccactctgcacacaacacacagtgctctctggctgatgctaagatgctcttcttgcactggtgttaaagtgtttggttatggtgtgccctgatatagtttcattcctctttctagttcttgtgcttgggactcattcagcttcttggatctgtgggtttgtatttatttttatcaaatttggaaaattttcagtcattagttattcaaattattctgtttattctactttctcctcttctcccaggattccaattacacctatattcgtgcacttaaaactgtgtgactttaatttttgttctttttaatttcattttctctttttaaaagtttctgttgctatgtctctaagttctccaatgttttctcctgccatcattgtcattcaccccacctggtgccttcttcatctcctgtgttgtggttttcaccctgaaagtttgggttttcttccttttacatcttcaccatttctacttaactttctgaacatacagaatacagtgataacttgtcttccaattataatatctgtgcccattgatcaatttgcttttgattgatcaattattcttcctaatttcctgcttttctatacggcaatattttatcggttgccagacatttgggctttgtcttcctttggggtctggtgggcatttctgcattcctgtatgtgttcttcaggcttgggctctgttccgggacagttatcttctcaaaggaaatagctgggtcctttcaggtctgctttctagggtctctcaggcaggtctggagcggggctcacccaggcctaatgacccccgactgaggcaaggccctgtgtctgctttgcccgatgccccagggatcatgaggttttccaatccggctggtgaagtaggtgctgttcccaccctagaacccttttgggtgggttcttccccagcatggggtagcttcctctcaagaatgtgctgattagtccttggtaggacactccggggcctccctcgaaggtcttggggttttctctctgtgcagccctctcctgccctcccctccctggggctctgtcccatgagtggcagtgcctggctctccccaggctctcggctccatcctgtgactcaggtcaccagcggactccacctgagccgccgtggtgagctcggaccttagctcagggaccactgcctgtcattgctgacgtctagtgttttcaaagtctttgtttcatacactgtttgtttttttgttgtttcagatgggggagtatctgatccctgttattccatttcagctagaagcagaagtcagctggcttgtaaggtaagttacagtggggtttatatcccggtgggagtgacccagtgtgcacaggaaccaggacacctgcttacgtcttgaagtgacaataggccctggacgctgtgaagcctcccttcttcctcagccatggcgccctgggccaggccatataagccctggatgctgtgaagcctcccttcttcctcagctacggcaccctgggccaggccatacgcttccaagtaatacgcagttttttgttcttcatctttctcgttctgggcacgtaacctttataagacataagaatggaattttaaaacattatgttattattactaaatgtttaatatgtcattttctatcatactgtatattttattagtgcttaaaatgatgttttaaaatagctaacatgtaaagacatcctcgatacgtcttagaggtttaagaagctggaataatgcagtatgtacagtgtattatggttataaaaattaagtgtgcgcttgaaggagatttgctgaagcaattccacagcatcagctttacccagcgggctgggtctgatcagctaactgaacttctgcaaggacaatgtacgacatccacagtaacagacacggctcaggtcagaccttgtggtgggttatgcttccctcgcgcaggcttctacacgcccgcactgggcccgccgtgtcgagacgcttgcgtgtggacaagtccgggggccataggttgggggcagggcagtgggcagggccagggaggctttgctgggggcggccccaggttgggggcagggaggtgggcggggccatggaggctttgctgggggtggccccaggttggaggcagggcggtgggcggggccagggaggctttgctgggggtggccccaggttggaggcagggcggtgggcggggccagggaggctttgctgggggcgaccccaggtttggggcagggctgtgggcggggccagggaggctttgccagggtgggagtggctggcagctgctgtggtggggacggctggcatcagggctgtgctggccctgccctcggtgggagcagcccctgagatgccgtctgcggccgcgctacagagccatgcagggcagggccacctcctgaggtcagggccctgcaagcagctcagggctgtgctcgggatgtgcacgtgtgacctgggcctgggcatgtgtgtgcaatgcgcgtgtgcctgtggctggtgggggtgggtggtgctgtatgtctgtgcgtgtctgccaagggctggaggtgcaaggcccaatgtggatgccctcgaggaaggtgtgggcagccgcagggctggggccagaaggaggccctgtcaggggcaacgggggctcccccgacggggagggctgggcatgtgatcagaacgtgtgggtgaggcggcagccgagagcttcccaggggagggtcctgtggaccccgcgggggtgcagccggggtgagccaggcccagaaggcaggatggcgctgggcgtgttgtgtgtaagagaagcagtgactcccgtgcaggggtcgtggaggcagccttacctcttgatcttcgcacgctctagttttacgtcaacacaattctctttgcagccacagtcgataaactttctctcaatttccaacaggccatcatccatctctttcagtagcaacgagcactctgtgggttcagtgaccgctgagtgctgcgcaactctgacccgcaggctcaggcacctgacggagggacggtttggggcctggagtcagaagccccagggccgcgtcagggcttgcggctgggctgccgctgttctccccggtgttcatccagggatgctcggagaaacgctttcggagcatttctcgaaaatcaacatcatatgggcctcattctgtgatcgcatgtgataaaatcagaaactcacaagccccaccccaggcactgtatccaggtggaaattcaaaaaccctctcctacttgactcactagtggaacagtatccaggcggaaattcaaaaaccctctcctacttgactcactagtggaacagaaacccatgttgaagcgttgggctgttcacacgctgcagctggggggcccagggcaaggtcgggagggaggcagagagcacaggcatgaggccgccgccccggagcagccacagcagggccctgggctgccctcgcgccaatgcagggagctccacaaagatgaagcagaacacaaggaaagcctgagtcaggcagaaatccgtgttgctggggtctgtaaaccaaagccagctccttgaaaaggtctgctgcgttggagcctgtgattctgatttagaagagacggcgttgccatcctggccaacatggtgaaaccccatctccactaaaaatacaaaaattagccgggcatggtggcacatgcctgtaatcccagcaactcgggaggctgaggcaggagaatcacttgaaccagggagtcggaggttgcggtgagctgagattgcaccactgcactccagcctgggcgtcgataaatggcaataagggaggcgtgcctgccgcaagggttttgtgaaagctataagaacacactccctacaaatttataccgacacaccacagacttagaggaaaaggtttcccaggcccttcccaaggccctgaagttgactttctaagccaaacagacgggacatgtggatggaaggtccacttctcaaagaaagtctgaagcaagctcaggaaacttctggagctttctggagctgcacggaaagctgtggatatgtggccccatgacgtgggtctctgaacttgcatagacttgacgtatggcacaaaaattgcagatggaaaagaggaaaccacagctttcacgctaatgaacagtgtttcttacaaagagttacctggcttctagatctgtgatcatgaattccagtaaaggcaatcggtttggtctttctttcttgaggatcttgaaggcattgatgagcttctgaaatatgtgacacacctgaggacaggcaggggtggatacgggtgtgtctgaggacaggcaggcatggatacaggcctgaggacgggcgggcagggacagatacgggcctgaggacaggcgggggtagatacgggtgtgtctgagggtggggcagggatggatccaggcgtgtcatcagcggtctgccaggcagagccccatggacgcccttcctctccaccaagcacctggcccggcacccgacatgcagccccaggtccccgtgcctcttaccgtagcttcccttcctgagtgttccatggacaagagcgcctctgccagggtcagagtggaattgtaccagaactcctcacttccgcccaggtgctgggcctgtgcgatcattttcttggcttgtccatagtttttctccttgttggccaactgtgcgaggaggagcaggcactgggcctctgcacaaggctcatccagctcctgaaggagagaaactcagacatgcttgggttcctctacagatgtgtgcaggcagggagacaggagcaggcagagagaaggaagagggagacagagaggcagagacagacagacgcaccaggtgaggggaagacagggctgctcactctggcagtggaagggtggggcccatggccgccctcgcactccctggcaggacttgcagtgctgcccggctcctgccccactgtggttccttgagtgggacgcccgcctccctgccctccagaggtttctctggagtcagcaccagctgcagcgcgcatgactgtatctcattccatttaattatatttcagtgaggagctgacaagtggaatcggcgttcagggaggcacagccccactctggctggtcttcggggggatttgtctccctctgcctgagctgagcggcaggaaacttcgtccccggagcctcctggggctcctgctggccccgtcctggccctgtcttttaggggctcccgcttggggcgaaaggcttcgggacagccacacctggacacggatgctgagcggctcagagcctcccagagccaggcctccccatccgggggcctgcagccagggagctgggcagccacatgatctgggacagaaatacagggcagactgtgctaagaacagagaggtgctggtcagagggtgaggagaggacgggagcggtggcgggaaagccggtcccagctgcagggctgcccaggtgtcttctgcagtggaaaggcagcgtcctgttcccatgtatcactttctggccaaacaagaggctctgtgtgctcgtttggacctgggcaggcccctcccaggtgtagctgcaggtgtggggacagaggggagggtgggctgatgagctggggctacccgccgccagagagcaggtgtcccagctgctgagggctccatctctggccgttccatgcatttagatgcccaggacgagggaggggccccagccactagggaggcatgccccagttgtgcccctgcccgacacaggatccacctggacgccacagcctgcatgcacctgggcatggctgtgaccgccagacggcgtaggcagggcctgggcccatagcagcctcgtgggcagtcaggtggcctgagggtaggcaggtgggcgactgggctctgtggaagggcattcctggcctctggaccaagcctggcagggggctgcaggcctctgaggagggaagagggggaggcccttcgtggctgggcccagagagaagggctggcaagggtccaacggggccgggcccctgcggggcttgttgagggcagctacagtgggccggaggccggcgacagggcgggcaggggcttccacatggagaggaggagggtgcggaggtgggacagagcttggccgggggtgaggagcgcccagaaggcagggagaggacagggtgggtggggcggggtggggggtgcgtgaggctgatgccagggtttccagtgccgacactgagtgggaggggcagagccctgtcctgaggagtgggcagtacaacaatagtcacaacccccaaggcagatgtttccagcctggaggcctctgaggtcggcgggggtctgagtgctgagtgctgaggctacagtgggagagcccaggggaggtcagacccccgagagacaaggccactgtgtgggtgggcctgagaggggaggggtgccaccagcaggacggagagagccccgcggaggagagaccagggtggaagggcagagcgcactcccatcgccggcctcggggagcaggttcaggagaggctggagggggacggggcggccgggctgcactggctgagggtgaggaggggcgggaggggagggcagcacatggaggcaggctttctgtggtgtggatgtggctgagaagccagggtgagctgagggcaaagttgaggacgggaggtaggaggccttcaggcaagagggcgggaaagatcaaggaaacaaacaacttcctgtcagaagcgcctgctgtgaaacaaagtccctgcaaaacagcggctgcaggaaggagggtggcgaacccacgttcgcgggagtccagcacccatcacgtctgtcctgggtctgggctccaaggtccacggtggccccgggtatgaggcaggttcactccccaagtcccagagctcaggaccacggaggccccggcatgcagcagactcactccctaagtcccagggctctcaccacctcccactgcctcccgaccccggggtgagggagactgggcctctgcccacctcggaggcttgactcttgccccgggagctcccaggagctcttccacacctccagccctgcggccccagcagaggctggccctcttctgtgtctgcggctaaaagaatgctgcacccatgtatgtcccctccatagctgtccacagcatcctcagtcccttccttggacaagctcccttttgaccctggtgtgcacacacccgtctctgctatcagagacctgcacacacctgtccccaatgcctgagacctgcacacacctgtccctgctatcaaagacctgcatacacctctcctcactgcctgagacatgcacaaacctgtccctgctatcagagacgtgcatacacttgtccctcttcctgagacgtgcacacacctgttctcagtgcctgagacctgcatgcacacatctgtccccctgcctgagacctgcactcacctgtcccccttcctgagccctgcacacacctgttctcagtgcctgagacctgcacacacctgtccccctgcctgagacctgcacgcacctgtccccctgcctgagaccagcacacacctgtccctgctatcagagacctgcacacacctgtccccctgagacctgcacacacctgtccccagtgcctgagacatgcacacacctctccctgcgatcagagacctgcacacacctgtccctctgcctgagaccttcatacacctgtccccagtgcctgagacctgaacacacctgttcctgctattagagacctgcacacacctgtccccctgcctgagacctgcacacacctgtccccggtgtctgagacctgcaaacacctctccctttgtatgagacctccacacacctgtccccctgcctgagacctgcacacacctgtccccagtgcctgagacctgcacacacatgtcccccgcctgagacctgcacacacctgtccccctgacacctgcacacacccgtccccagtgtctgagacctgcacacacctgtccccctgcctgagacctgtacacacctgttcccctgcctgagacctgcacacacctgtccccagtgcctgagacctgcacacacctgtccccagtgcctgagacctgcacacacctgtccccagtgcctgagacatgcacacacctgtccccagtgcctgagacctgcacacacctgtccccctgcctgagacctgcacacatctgtccccatgcctgagacctacacacacctgcccccctgcctgagacctgcacacacctgccctcagtgcctgagacctgcaaacatctgtccccctgcctgagacctgcacacacctgccctcagtgcccgagacttgcacacacctgtccccctgcctgagacctgcacacacctgtccccagtgcccgagacctgcacacacctgtccccctgcctgagacctgcacacacctgccctcagtgcctgagacctgcacactcctctccccctgcctgagacctgaacacacctgtccccctgcttgagacctgcacacacctgtccccagtgcctgagacctgcacacacctgttcccagtgcctgagacctgcacacacctgtccccctgcctgagacctgcacacacctgccctcagtgcctgagacctgcacacacctgccctcagtgcctgagacctgcacatacctgtcctcagtgccagagtcctgcacacacctgccctcagtgccagagataaagtctgaacctctcaaggctttgatgggcatcactgaacttttataccattctaggaccctctctttttctggagtttttcttcaaaacatcgacaggctgtctggttctgcagctctgcctcaccctcccagtgaaagcaactctaaaatctggagagaagatgtcaccacgtgtctgaggtgagtttggagggcagtcagtgctggcaaaaactggcaactacactctgcacagagaaaagcacccgtgggcctccatccatctggctttttcctggggctgccatccctgctgggggagtgcaggcgcccagggtgaggagaggaggctgcagctggggcttccggtgctgaggcttgcagggccagtcccaggaggaggggccgaggtgaagggtccaagggctgtcagctgggcttggctgctcagggcagagcaggatgtcacaaagcctggcaggaaccagctaagaccaaacaggtgcagcgcccgccggggagacggggcctcagcaaacgtcccggggctttcgctggggaccgtaagggtcccatccagggagtgagagcaaaacaaacaaagaccagaccaggcccagattcctggacccaggcagccccgcacacaatccgccttctagaacaaagtggcgctcctggcagagacaccctctggggttctccaagttctcgtccagcctcagaaggtaagaaactgactatggcaggaggcagagcggagccactgacacccaagagaaacgagaggttgcagagaccaacagcaggtactggaaatagaaacttcagcaaactgtgagtggcagagcaaaagacggacagacagaggacgcacaggactgacttcccgcagagagctggacccagacaagagaggcacgtggccctgctagagctgaacgctacagcccaagcttctgcccgcagtccctccactgtgcacagtgcgctgggagcggctgtggatggtgatgggctgggaggggctcctcacctggaaagccaggtaagcctccgacaggagcagccgtgcaggctggtacaggttcatctccagcagaacttctgccttcagcatccacaggtggggaaaggacgtcccatccaggtccctcccggtctccccattcatcttcaaaatctgtaagataccgcagccccaggcggcacgatcctgacacttgtgacctctgagtctcacgggacaggctctggctcaggagccatctgtaccacacagggagccacaccacaccaagggctccctgctggcctaggcaccatgggcgcctcgcaagctccccgtgtgccccaaggccagagctcaggcctttgcctttcccccgacagacctcctgcaccctgggcacctctcttttctcacgaatccccttgaagccaactaagcccaccactagccacgtagagcctttgctactccacacacacacattggggtgtaggaccccttgccccacctcgtggtgccgaacaaccctgggatctgggcctgcctgcggctgtgcacccggccttgctagggcgccccgggtgtgggccggtggctgagcccctgcactaggatctgggcctaccccgcatccccccagcctctcctcgctaagcagagcccccggcctggggcggtggctgagccccgcactgctgtgttctggatccaggtcctgtgctgagcccctgtcctgtcctgactgccaggtcacaggaagcatggcctttgcccctccatggtgctcccacggtaactgcgttttgggttaggagccaggctggtcaccttcctttatgggcaaatgcagaggggtgctgtgctctcctgctgagggaaacccaggtggtgggagaaccagttctgtcagatgaccgggacctccaggcggagctccctcttcgctgcccccaccttctctcagcctctgcccaggcgcccagcaggcctgttccagggaggcccgtggtgcacataaagctcatctttcccggggaattccagggcccacgggaggagaaatcagtcacaggaagcccctcgcacactgacacacaggccagccccacacaaacagacacacaggccggcccctcgcacactgacacacacacaggccggcccctcacacactgacacacacacaggccggcccctcacacactgacacacacacaggccggcccctcacacactgacacacacccaggccggcccctcacacactgacacacacacaggccggccgcctggctcagctgcagccctgcatggccacgaggcaccggcgcccgctgggctgcgggtcagagggattctggacggtgaggttaccttgtccttggcgtccagtggtttgatctccccaggctggacaggaagtgtctgctcattcagtgctggcaggctttcttctaataaaggctccttatttttctcttttttcaacgcgatctcttttctgcagctaatgcgaggaaaacagacaatacgcaagagccacatggccacgaaaatgtcccttcacgagtaaccaaagaaacgcaaacgaaaacagccacaattacattcttcacgcgcgtgtttacaaagatttttaaaaatcctcaggatctaacggcacatccgactcccaaatttgtgtccatcactggttctctcttccaaactccaaggtcatgtccagctgctgtttgacagccaggggtgtttaatgagcatctccgactccatctctccggcgtgcccagccccggccccgctgtgcctcccgcgggcacccccaccggaaagttcggaaccaactacaggtccctgggtgggctcctgctccccgctcggccttcccacggggtcttcaaggtgtctgctaccttccccttcgctgctccacctggccccggccacggcccccggctgtcccgccttctcctgtgccatgaacaccaggtcctggccatttgccacagcacgtccagagaggtcctttagaaggcaggccagcagggggtcacagcagaggtcaagacccagcaggcccagccccagggcgttttcgtcctctgacctctgaccctctcccgaggcctgcacgcccctctgcccaggcctccccggccacgcgcgttccaagtcgaggtgccccttgccgccgagacgtcgctgctcccagcacaccacatcgcgctggccaccccacatcgcgttggcctctgccatctgccaccctccacagctcgtaaacaaatgaacagcagggaaccaggaccctatggcctccacaactcctttgctccaaagttattttagggctgtgaggacaaccgggccaaagaccaggttcctgggacactgctccacgtcccttataccaggagagtgtggacacggttccaatgttcagccgggctgcacagataactcacggtgcacagataactcacggtactgaaaaatgcaaagttcacattgcaggtgaaggctggttaccacaggccgctaagtgaaagggtatagagagcttaattccactttcaccataacagtgtctgtttcaatgtaacggcgaaatggccggaagagcatgagtgaaaatatgaacagggttatgctgaatgatggggccaatcgtgagctttattttcctctttcttttatctacatgttctaagattttcactataaaatgtatcacttacgtaattttaaaaagtatcttgtaaaaactaataaaaacagaaccgtatacaatcatagcacagaagtatttctgagatggtctctaaatctaaaagtgatttgctacactaacgagagttagttgttacacagcctgatgttagtaaacttcaacagctctgaagtgaactcctgcctgaaggctgccggagacgggagtggcctgaccgagcactgcctcaggacccggcgcccagcacccagcgcccaagggtccagggcccggcagccagcctttctgtcctccggggaggggctcgggccaccctggagagcccccctcaccgcccctccctccctctgtgaggagcacctccccacaacccacctccagcacgacccaggagaaccggccacagccgtgtcccccaagtgctcactctccccagaggggcaggagtccagggaagagggtggccgcgcagctggctttcacctggccgcaccaagggcgagactcaaaccccaggcggcgcagggtgggacggcacacacctggcctgctccagctcgctgacgcacacctgcccgaccgcctcttcatggcgcgcggctgcttctctcagcttcagctcggagcacgcgtgggcgaggctgtggggagtgtggccgaaagagtcagtgttgcacgggcgcagagggagccagaaacgaagctactagtgtgcttcacagaaaacggtcaactaacacatcgaggcacacttggatggtattttcaatcatttttaaaggtaagcgaaattactagggaaaagtgcccggtagctccatcaaatttcaagtgggattcttctcccgctccttcacagatctcgtgcgaggcattatctgttgcctcctggacgccgtccgaggagaagaggaggccctcaggtgggctcagcacccaccacaataagcagagaagcctcgactcctgttgaaaaccctattcttgtaaaatgctttcaggcaagcaggaaagttgcacagacaccaggaagcatccctgtgcgggccccggtggtccctcttagccccgtgaccacgcctgctccagcctcctctcccgtgcccgcccctgggatatctgagcaagctgaggatgcaacttgcagcctttctcccggatccttcagggcacaggcgcctccatttatcaaactgtgctgtattgcgctgctcagatgttgcatattttacaaattgaaagtctggggcagccctgagcgaccaagtccatcggcgccattttcccacagcacctgctcactcggtgtctctgtgtcacattttggtaattctcaaaatatttcaaactttgtcattattatgattgtgttatggtgatctgtgttcagtgatctttgcggttaccattgtaattgttttggggcaccatcagccacgcccatatgagacggtgaactgagtcgataaatgtcccgtgggctctgattgctctgcagcttggccgctcccgcatttctctccctccccttgggcctccctattccccaagacacagaaattttgaaattaggccagttaataaccctacgatgggctcttaagtgttccagagaaaggaacaggcgcacgtctctcacgttaaagaaaagccaaaaatgattcagttcagtgaggaaagcgcgtcagaagtggagacagactgcaagctcggcccctgcaccagttaaccaagctgtaagtgtgaagggaaagttctgaaaggaaatgagaagctcctacagggaacatatgaatacaaatgacgagaaggtggagccgcctcagtgccggtatgaaaaagtttccgtggtctgcgccgaagatcaaaccagtcacaatattccttcaggccgaagtctcatccagagccaggccctcactctcttcaatcccatgaacgctgggagacgtgaggaagctgcagaagaagtttgaagcggcagaggtgggctcgtgaggtttctggacagaagctgtctctgtcacataaaaatgccaggtgaagcagcaagtgctgatggagaagctgaagccagttagccggaagatccagctaataagagcatggatggtggctacgctaaacaacagatttccactgtagaccgcacagccttctattggaagaagatgccttctaggactttcagagctagagaagaaaagtcaatgcctggcttccaagcttccaagcacaggctgactctcttgctaggggctaacgcagccggggactttgagttgaagccaatcctcattcaccattctgaaaatcccagggcctttaagaatgatgctcaatctactctgcctgtgctccgtaagtgtacaacaaagcctggtgacagcacatctgttgacagcatggtttgctgaatatttaaagcccactgttgagacctactgctcagaaaaacagattcctttccaaatagtactgctcattggcaatgctttggccacccaagagtgctcacggagacatacaaggagacgaatgccttctccgtgcctgctaacaccactgctaacactgcacccatgcagtccatggatcaaggaggcatttcgactttcaagtcttactatttatgaagcacatttaataaagttatagctgccgcagagagtgattcttctgatggatctgggcaaagtgaattgaaaaccttctggaaaggattcaccattctagatcccattaagaacattcctgattcatgggaggaggccaaaatagcaacattaacaggaatttggaagaagttgattccaaacctcatggatgactttgaaggatccaagatttcagtagaaggagctacagatgtggaggaaatagcaagagaagtagaatcagaagtggagcctgaagatggcactgaattgctgcaatctcaagagaaaacttgaatggatgcggaattgcctcttatggatgagcagagaaagtggtttcttgagatgggatctgctcctggtaaagatgctgtgaacactgtggaaatgacaaaagggacctagaatattccatacattgagttgataaagtggcagcagcatttaagagactgactccaattttgaaagaacttctgccatgggtaaaattccatcaaacatcattgcatgctacagagaaatcttttgtgaaagagttgatccatgtggcaaattttattgttgtcttattttaagaaattgccagcctttttagcatttttagtacatacattttaaatggatgtatgtacattttttagacataaggctatcacacacttaatagactacagaatagtgtaaacctaacttttatatactctggaaaaccaaaaaattcatgtgacttgttttaatgtgatatttgttttgttttggaacacaacctgcaatatctccaagatatgcctgtatttccttaaaacaagaatattctcctaaggatcaggtagaaattttaaaataaaaatatcatattttatcttttaaatttttagtaacagcatcatgctctgttgcccaggctagagtgcaggggcatgatcatagctcactgcagcctccatttcttaggctcaggtgatcctcttgcctcagcctcctgagtagttgcgacaacaggtgtgtgtcaccatacctggctaatatattttttaaattttttgtagagatggggtcttgctatgttgcccaggctggtctcaaactcctgggatcaaatagtcctcccgtcccaaccaaaaataccattttcatattcaaatatttttatttacttggtgttcaagtcccagggactttattatttacacagtcaactacagaattaataccttaacatgttgtttatttttgttttgctttggggaaatcacactccgaaaaaggagctgtacccaccgaaggtggtagagatccgacaggcccttgcttcccaccacggagtccgaaatcagcacccccaactgcaggacgggaaccgtgagttcgtgcaggcacatcttctgcagggccttgaccaggtggtccaggaaatacaaactgtatgtctacatggacacataacacacacaggaggtcacaggagcgggtgtagaccacaagcataagggtctttcctcagagaactccctccctccccatgccagcacatgtctgcacacagcaggtgctcagcgcgtgtccgcacacagcaggtgctcagtgcgtttctgtgggatggatggaggctgtgctatcttccttccctcttccactcatgggtttcattttgtcacgtgataatctttgtgaacatcagcacccaagtatgaagatcctcacaagaaacacacccttatgtgtttgtttcatttttccactaaaaactactgactcattagagacagaatttctttgtgtgcacacacaaccacttacaaatttaatatatagagaagagctaatgcttcttattatgttggacttggtttgttaaaaccattactcttgagtgggaaattaggaaagttggatgacttgtcgcaaaaatgtacttctaagaactggaggataatcaatatccaaagaatgactgggccaagatctggaagtcagtatgcatccagggacacaagcctggctatcaggcactgaggcatccagcgacacgagcctggctgtcaggcactgaggcatccagggatacgagcctggctgtcaggcactgaggcatccagggatacgagcctggctatcaggcactgaggcagctgagggccccatggtgctccgcatcgtgctgcaggctgggcttagaaaacggggttcagggcccaccaagagctccactctctcactctctctctcaggctgggttcttgaagggctgcacctcagaattccaggcaatctaggaggaggccgtcccctcagggatgacaaccaggcagaggggccgtgcgggtggcctggaaagcacagggtcctttgagaggtcaatggaattgatcactcccagtgaggctgatcgggagagcgagcgaggggtgacagggctctacaggtcccacaggcattaaaaggtaatacaaggacattgagaacaacttcatggcaatacatccaaaatgtattttcaataaaaacatcccagaaaaacacaacctatgaaaactgttacaagaagaaacagaaactctgaagaattctataactatgaaataaattggatccataatttaaaattttcccaaacagaagctctgggctcagatggctttaccagggaattcttccacgcatttaaggatgaaataaccaccaatcttatacaaatttctcctaagaatggtcagaaaggaacacttgtaactgactaaaaggccagcgtaacttttaccacatcctgaggaggacacacatgaaaggaaaatcaaacatcgtcctcctcacaagcacagatgcacacaccccggaaacaagtgccgccaaccaaagctggtgacataaagtgagtgacagcacagccaagctgccctattgtgataatcattagaaagaatcaaggtaattaattcaaggaatgaaggaggaaaacatcatctgcatagatggagaaaaatataaaagcattcatgactaaaattattagcgaatagaaataaacttccttcatcaataaagatcgataaaaacctacaactgccctattgtgataatcattagaaagaatcaaggtaattaattcaaggaatgaaggaggaaaacatcatctgcatagatggagaaaaatataaaagcattcatgactaaaattattagcgaatagaaataaacttccttcatcaataaagatcgataaaaacctacaactgccctattgtgataatcattagaaagaatcaaggtaattaattcaaggaatgaaggaggaaaacatcatctgcatagatggagaaagatataaaagcattcatgactaaaattattaacgaatagaaataaacttccttcatcaataaagatcgataaaaacctacaacaaacatcaattatacttcagagtaaaatgctggaaactttcctttgagataggatgtgcaacataaaaatagatgttatcaccattttcattcaacctcataccggaggtccttgccagaatataaggcaaggtaaagaaaaaacagtgtaaagagtggaaactaaaaaagaaaaatgtgtttgcagataaaacgatgatgtacacacaaaatccaaaataatctacagacaaattactaaagttataaagagcttaacaaaatggatgcttacaaggccaaaatgaaaacaattacatttctatagtttatctggagtttaaacatgaaacaaaaaagctatatttacaacagcatcaaaaatatcaaatacacagaaataaatctgacatgcataactgccaagcagaaaactctggtctattgttaagagatgctgaagaagacctacgtcaatggagagacagaccatgtccatggatcaaaaggctgaacaccataacaatgtcagttctccataaagtaatttacagattcaatgcaatgtcagtaaaaactctaccagggtttgtgatgggtctgacacactgattctaaaatacacatggacatgcaatggagaataaaaggaatagcccaaccgtcctgaagaatgaggtaaggagattttctctaccaaatactcacggttgtgaagctcagtaattgacaatgagatgatgatgccaaggacaaaaaactaacagaaagcaagagagaccccaaagcagccccatgcacaggtgggcaactgctcatgcccagtgcagccagcagggaaggcagccagtgacatttcaggaagtggtgtcagaacaatgggacaccctgactgccatgcttgaggcttgacccctacctcacaccacacacacatcaagttcagatgacaggcaaaactacaaaggtgcaaaatatttccactttttggaaaaatactataacagaatatctgtacaacctccagaaatgaaaacatcaaaaaaaaggacacacaaaaaactgactaattacaaaggaaaagactaatgactcttattacattaaaactactaatccctgttcccaaaaagacctccttaacagagtggaaaggcaaggcacaaagtggaggcagatctgctggtcacatggctgctcatgtgattttccagaataaaggattccttcaaaccaatcaggaaaagtcagaaagcttaattaaatatgggcgacagcctggagggcacatcacaaaagaggacctccaaggataggaagcactgaaggccaacctcactgtggccaggggtgtcccattaaaccaaggggaatgcccctgcccacccaccggctgctgatattgaggggagtggcatcagcagggatctgcgcagggccactctacccacagcgggcacggcagtgaactgaatgaccactatggagggcagcatggcagcgtggcaccaaacaccgcaggtggagatggtccaggtgtgccctaaatgcaattctgtgggagggagcgggagatttgatccacacaaaagaggaggccacgtgaccacagaggctgaccgggatgaggaaagagggatcttccccggcccctttggagggtgtgccaccctcccgacacctggatttgagcccagggacactgattttcggcttccggcctccagaaccatgaggggatcaatttctgttgttttaaccatgcggttgtgggagcttgtcatgaacacctgtcctgtctcactaggtacgtgttggacttgagtggggaaagaaggaaggctttcctaagtgtcggcagttgagggcagacagtggtgctgggagggcctgtgggaggctgggggctgatgggactctgtcctgtcctcctttttctggctacagttcacagtgaaaactggacttggggacaggtcaaggggacaccatgctgtgaccaaggtcttgagccttttctttatgtcaacgtaccggcttctggatacttgaggggttcacagtagagtcacttctgtcctgtttcagtacagacagcacttcctcggggcaggagtaggaagcccactcttctatgctcatgggtaagtcttccagttgtttgataggagctgggctttgagactagaaaggcaagaatacaggatttacctgaaacggtggaggtgaaacagcagacacccccggcccaccggcatggctgtgcagcattcaggccacagccctgggcagccggcatcctccccaccaccaggtcccagcgagtgcccagatccagcctctgatactgtttccaggcagtgcacgcaaagctttctgccccgtgcacagccagagttggcctgggggtgcccaggctcaggactcccgagagctaaggctctgcagcctctgcctcctgcgtctcccctcagtgacagctggctggtgagctcagcagtgctcgtgctggggtccgggtgtgagcgtcccatgaactcagcagtgctcgtgccggggtccaggtgtgagcgtcctgctctggggagctgggcagccaagtggtttctcagacctgcccagcactttgagaagtggatacttgcagagagaaaggtttcatgagatgaaaaaaacacttttctcactgctctgggacccaggccctgggctgtgtctgctgccatggcctctgagcctggcagacctgggacaacgtgctctgtgcaaactgcgtgcattacgtggctagctccaggcccgggattcctgccagggacaagccagggtgctttacagacattcccctgtattgtcctccaagaaccctgacagggagagaaactgaggcacagaggccagccggggcccagcctctgcactgaggccacctggggctcctccgagaaccctgacaggcagggaaactgaggcacaggccatcccgggcccggcctctgcactgaggccgcctggggctcctccgagaaccctgacaggcagggaaactgaggcacaggccatcctgggcccggcctctgcaccgtggccacttgggcatcacctgcttgggctccttgactttctcctcctttcccttctccttgtccttctctttactcctctcattctccttctctttactcctctccttctccttctctttactcctctcattctccttctcttttttaggcaataacagatgtgagctggttgctgccaggggtctgttttccagaactgattttcctgctgtcatcaaagaaacctggtggggatgaaatccacatttgcagcactgaaaacccacccaccgcccactctgcccaccctccactcctggatgagggacgctcagacccgcggggctccccagactctagtgctctggtggtcttgcgtccccgtcagctgccatcaggggagcccctagagcacggagctgggctggcccggggtgtgggcaccgggggctgcagggacatgcccgtgagcctgctggctccgcgggtgtccctcagtctcactccactgtcagggacacagcgggacacccctggccctggggctccctgctggccatcccgcactctccctgcagcggcccttgttggggatgtacccaggcagggaggacgctaggcacgcctccttggcaggccctgcgggcccctcgcggccctgacacctgggggtctggggcaggcgtggctggccctgggggagacttgccactccttgggtgaatgagttcgaggtctctaattaagaacacatgagaataacattgagcaattctcctagaagagtcacaaagaatggcagcgtgggcgcccacagccccgggtctggcagtggttgaggctggtggggggttagcgtggagcattctgaagacgggataggggggcctccctgcctttcctgctctgcccacggctgggcggtggccctcttgatcctgagatgccctatgggggctccgggcaaactcatcctcagaagaaaggcctgccatgcctggcgctgccctgctggggtgtagcctgcgggaggcctagacagacgcacggggaggcccccgacagctgctcctggtgggctttacagggagaggtggtaggaggagcaggacaaggaggggggtgggagtgggaagaaggctctggaagccccgtcagcgggcggttcaggagctgtcgggccccagctaacagaggcgcctgccgctgccttggtgtggcgagccaggcagaggcagttttgggtggtggtctgcaagggtgccagggcgggtgtcagggaggaccggctgatctggagggagccacgagcccctcccttggggagtgctgggaatgtggagggtgcaggaatgaagaggggagtcttttgttttgggggagtctcttgtttttatgctgatgggaaccattcaggagagaggaagaatctggatgtcgcaggaaattgctcacatctcaaaggtctttaggaaatgctgggaaagactctgacatctttacaacgctcactgcggtttccccagcccgcggcccgtcccgggaggtgctgcaggagcaggggagtctgcgctgggcctcacctgccagatgtgcctgaagaaggcgtaggctgcaaggcagcagtcctcgtagccctcggcgcccggcgacagcaccagggccagcaggatgtgcacgcgggccagcgcctccagctgccgcacgctacgcagctgctccaaggacaccgcctcctcggcctcggacacggggctccgtgggggcatctccacagccacgtactcccctgaaacacggggtgcccgaggctgagagcaggcccggctacgggtctgtgggccccaggccactcccttccctgcccgaggctgtggtggactgcccggtgcctcgcggacacccggtgctccactctgctgagggccggcagccaggggaagagtcacgtgttgtacttactctgcgaaggctgagcttggctgccccctcacccccaggggcagttccagtctcagctccagccccaggcccccagaccccgagagctctcctgctgccctgtgtgtcctggaagcctcatgagctgcacctggcctgggcaccccgttcctgtcccagactgtcccaagggcctgggagttctgagcagggcccccactcatcctgacagggggctagaaccgcggccacagggagggtggccctgagcaagccagcattgtcgagtgctctaggatggccctgctgtgcgcacgtgtgtgtgtgtgcatgtatgtgtgtgtgtgtgtgtggagtggccaccctagctgggctctgccggcctctgctcttcacggcaggactgccgagccaccccatgggactctccgtgcgcacctgcgctccccacagagtttctgccccgggtcaccctgggctgatgcccaggcactggcagtgtttaagccctggatgatgccagtggggccgccattgtctgcccaggtccccacttgccagcaaacacccactttcctgcactgctgtgagcaggggctgggtggccaagggcctgctgaggagcagtagctggagaatggagcccccacctcgagtcagaagcaactttggggatggctgaggtgcccacagggtctgaggtgctctggacccccgctcccccggcctcctgaggaaggctgcctctgggccggcccagctgtgtgcccgagaacatgccttccgcctgacctggatggaacctttctgtgaaggtcatctggtggcagtcaggctgagtccctcagggcccctgcagaggacagcactgagacacgtcaggggcccctgcagaggacagcactgagacacgtcaggggcccctgcagaggacagcgctgagacacgtcaggggctcctggcctccaaagcctgcacagacacatggatacccaacggcggtccagatcacggagcaggaagcagagctctggggagcggcgtggggtcggcaccctgccagcggcgtgggctcaccatccggcgtgggctgtggctcagggacatcgccgggcggcttcatggccagcaggatctcgacagcccagcggaggtggaagaccacgtcctcgagaggaaagtgtctgtgatggagccactggccgaactccatgaggtactccaccttctgccactccatctcaggcttctgtgggattgaacaggaagggtgacatcctcaggatggccctgaaggcgttcctgacgcagtggaatacttttattgctcattttctacaagaaaagcttcattcttacccccacagtgatcatttgcaggccgcctctaatgagaccaagttgccatttaggctcattgggacatttcaggtgcagttgtttcttttcacaagcagaggtgggaaggctgcagcttggcgaattccttccccgtctcctcaccctttgcagatgccaccctcctggggactcccgggtccccagacattccctgcaccgcaagaggacacaggacaggggtcctgctgtcgctctgtctgcaggtggccctctctgggtggctctgtgggcagccccatgtccctgctggaaaggaggcctctgcagggtaggaaaggtgtttgccctgtcctgcgtccagatgcagagcccagtccaaggcctggcctgtgcaaacttggccatcatcgctacagaattgtatgaggctgccctaacctgacccttgcagagcagagcctcagccctgagagccagggttagcctgcaccgcaccctccgcagccctgcgagccggggttagcctgcaccgcaccctccgcagccctgcgagccggggttagcctgcaccacaccctcccctccacaggtgctgctggggccacggccacactcttctccagcagggtggacctcgcactggcaccacaccacgtgccatgcacagatgtcgccgccacttcatttctgctgtcaaatatctgtggctctctgagcgctggcccatgccacttattcagcccacgaatctgctgggggttccctctgtgctcggcactcacactgcatcagctgtcacaagcaggtccccatggggtgtgagtggtgcatgtgggatgtggggtgtgtgtggtctgtgtgggatgtggggtatgtgtggtgtgtgtgggatgtaaggggtgtgtggtgtgtgtgggatgtggggggtgtgtggtgcgtgtgggatgtggggtgtgagtggtgcgtgtgggatgtggggtgtgtgtggtctgtatgggatgtggggtgtgagtggtgtgtgtgggatgtggggtgtgagtggtgtgtgtgggatgtggggtgtgagtgggatgtggggtatgagtggtgtgtgtgggatgtggggtgtgagtgggatgtggagtgtgtgagttgtgtgtgggggtattgggtgtgaatggtgtgtatgagatgtgggttacaggtgtgaaggtgtggcctgtggggtgtagtataggctgtgtgggggtgggatacgtggggtgtgtcttggtcacagctgtgggctgttaagttgggtgtgtccatgggtctaggtgcaaggtgtgggtttgttgtggatgtcgggtgtaagtccagccaccggaggatggagctgcaacatctcgagggggaaggcaagaagaaggatggtgggaaaagcaagcgtttggttttgggtaagatgctggccccagggcggggccaggcaggcagcaggattcacaggtctagcgggtggggggtctgggctagagaattgcttgtgggtaaaatgggcggcagcggtgcttagctcaggacgtgcagtgagatcagatggccaaggtcctgcccttagcccggggcctcctctgtcatgaagaggtgggaaggggaggaggacgaggaaccagtgaggtggtggggcttgggagccacgtgaaggatgcccatggatggggaaggaggggagcagctgtggaggccgatggtggctcccacaaaagctgtgtacgcgggggagggccttggccctgatgggaggttcaagggagagcaggtcatcttctcaacagaagtgcggggccagctggcatccacaggctgaggagtgccggggaccctgcctcacactgtataactcattaacataacagctacaaccataaaactcagaagaaaacaggggaaccaaccttcaagaccttgggttatgcaacagtttcgcagatataatgccagaaacacaagcaacaaaacaagacacagacaactagaatttcatcacaatttaaaacgtgtttgtgccacaaatcatggcatccagaaagtggagacgtggctgaaaaagcagctcacagaacgagaaagggtttgtagatgaggctcctgctaaagaacctgcatccacgatacaccatgagctcctctaaagcaacgaaaaccaaccaaccagattaaaaatgggcaaaggactgcaatgaacacttctccaacaacctacaaatggcccataagcacatgggaatatgcaccccatcatcagtggctgggaaaatacaggcaaacacgaggagacacccctttcacccctgccggcacagctagaatagtcagacgacatcaagagctggtgagcgtgtggagaaaccgcagcccacgccctgcaggcgggaaggcaaccctgtgaggccgctgtgggagacaatctggcacttcatctgatggccccacacagggcgaccgtgtgcccagcaactccactgctgggctgtgcccccgggggacgaggaccgggccacgccagaactcgggagcaaatgctgaccacagcattcctcacagcaggcagacaatgggaagcaacacaaatagccatctgtggactgtaagacacataacggaatacgactcagtcctaaacgggaatgatggggatggccctgggcgatgtcatgctgcatgaaggaccacgtaatgcttggctctgtttacagaaaatgtccagatctgtggcttgctggggccaatggagggagagaaggatggggagtgagtgctgatggatgcaggattgctggggggtgatgaaaccttctaaaattgtgtgtgggtgattatataaccctgagaatttactaaaaacatgttgtacctctaacaaagacaactgaaggaaggactcgggtaagtgaagacagaaaacactttcaagggtttctgccccgaggcccagtgcagctcagctgggtcctgccttccccagccgcccgcagcctcccctcctcaggcccttcctgctttccctggaggcagccaggtccctgcctgatacccgcgaaccctagcagggcaactgccgaggaacgacgtggcctctggttccccggagcgaggagcagtggctccctgtggctccccacggtggtacccaggcgtctgccttgatcacccagtgccctgagccggcactcacacagcaccgtcagagacccccaaccatcctcagttcccgatgccaagggccccctggaccccagaacaatccaaaggcctcggggcaggattgctctgagccggagaaacagctcgtgtaacagaaaagccttttaagatcttcactaatgttgaaaggttcatgcctttcacaccaggggcctgggatgccttttcgtccccaagatgaagttctcaggtgcataccacatggcccttgcccctgacaagcagaggcatcaaatcaacgccaaagcacccacctcctcctgagcccaccccaaggggaacgtccatctcgccttcctgggggtggggaagagacgccaacatccccagaacgcccacatcccagggccctgcagagccctgctctcctgtgcagccacccgcccatcggggcccctgcctgctctcctctgcagccacccgcccatcggggccctggtgccaccaggggagcctgggcgcttccacttggggcatcaccctctgggcccccctcaccctgctcagggacgaggacctgaccacgacccctccatgctggaaagggaccactgaaaccagctccatccctcgtccctgactggtcagcaagaggagtgcccggggccacgcggtgcattctctgtgcccgtcagctgtggctgctctgcgtgctgccccacaccaggtccctgctgagcttctgtccacacggttctccctttcactaaaggacaaattttaccacgtgcacccacgcttacggcttcacacctgcaaggcctggatggcgttgttgtagcaggccagctctccagacacgctcggcgagttcagggccaggcggtgccacatgcgcgccaagtagtcctcactctcggccttgaatttctgtatttccatcgaaaaattctgcccgagcttggccttcacgatgaccatgtgcttgaagatcaagctaaagaaagggaaggtgagaaaccaacgtcaggatcgggtggcagaattttaaacgtgggtgatgcagcccggacttattcctccacctccagcttaaaaagacgaagcaaagcagagcccaggtgagcgggggtctcggggctacgcgggggtctcgggggtgagcgggggcctcggggctatgcagggttttcagtccccgctctccctgtgttgaattctcctggggaagtcaagtcttccagtgcaagtgggaacctggggaggcccaggcagagggggacagcgtggagcaggggagcacactctgggtgggggagcagcaggcaggtgctcacaggtgatggggggagcacactccggtgggggagcagcaggtggtggggggagcacactccggtgggggagcacacccccggtggggatgcagtgggtggagcactcacaggcggtgtggggagcactcacaggcggtggggggagcactcaggcggtggagggagcactcacaggcggtggggggagcactcacaggcggtgggccgtccttggcagcacctgcacagcctcgtccagcaccttgaggccgccctcccagtcgtcctggtcggcatggctgtggaagagcaggccgtagagcgcagcacggagcgccaggtcgtcctcagcccctgggagggagaaggaggggtgtccttggagccgcctgatccctcatcaaaggcgccctcggacctcccagactaagctgcccatcacagtgcccctgaggtggaaccgcggctacagaggtgcccaggccagcgcatgccccgcagggctgaagtgagctgtggacctgcatggcccctccagccccacagtggccacccgggatgccctttccgttgcaggaagcagctgtcttgtctccttgctgcctgtcactctccatctccttggagaattctgcgttcacaaacacagacctgtgtttccacgtattaaagattggcgagcaggacttggggtcctttcaggagttgcatggaaagctcccccgcggccgaggacacagcgccacgtgcacgctcgggagtcctcatgcttggtgcccgcagcacgggaacaatccccgagtctccacgcaggcagcggagccatgtgacacgcagaggcaaaggtgcctgccttcagggcacacacaaaaatcgcctgcctgccgggaggtgagccccacccagcctccatagggcgccctgtgggccatcagtgcccccaaatgcacgaagccagcagggtggatcctggtgggatggaaccctcagtgtctgggcgagctgcagatgaacttgaagggccctgaagagacggggtgaacacagggccgcatccctcacacatccccagtgagcacagaacccagcccactctgccaccttccggccaagagtccttttacctcaaggattccaagagccccgggagatccaaaacatcaaaccaaggccatggaggccccacctcgggaaggggtgctgagtggcgggtctgtgccttgttgctgcccccgacccaacacagccatggcgactagaatgctgacgcgtcccctccccgtcatgggcgctgcccagcccagcctgcacacccttcccctgacggtaattcccacaccctcccagctctttcagaggtcagtgaaggatctgtcttctctcttttctcttctctctctctcgcctctctctctgctctcttctctcttctttctcctctcatcttctctctggcctctctcctctcctctctcacttctctctctcctctcctctctcctctttcacctctctctctcctctcctctgtcctctctcacttctctctctcctctctcttctttcctctcccctcttctctctctcctctctcctcttctttcctctcccctcttctctctctcctctcccctcttctctctcctctctcgcttctctctctcctctcctctctcctcccctcttctttcctctcccctcttctctcccctctctcctctctcgcttctctctctcctctcctctcctcccctcttctttcctctcccctcttctctctctcctctctcgcttctctctctcctctcctctctcctcccctcttctttcctctcccctcttctctctcctctcccctcttctctctctcctctcctctctcccctctcgcctatttcctctcctctctctctcctctcctctctcctctcccctcttctctcctctcccttcttctctctcctctcctctcccctcttctctcctctcccttcttctctcctctcctctctcctcttctctcctctcccttcttctctctcctctcctctctcctctttcacctctctctctcctctcctctctctctcctctcctctctctctccgctcctctctctctcctctcccctcttctctctctcctctcccctcttctctcctctcccttcttctctctcctctcctctcccctcttctctcctctcccctcttctctcctctcccttcttctctctcctctcctctccccttctctcctctcccttcttctctctcctctcctctctcctcttctctcctctcccttcttctctctcctctcctctctcctctttcacctctctctctccgctcctctctctctccgctcctctctctctcctctcccctcttctctctctcctctcccctcttctctcctctcccctcttctctctctcctctcccctcctctctctctcctcttctctccctctcccctctccctctctcatcccaggaataagcttcagtgaagcctcgtctggaaaactctttggatctcaagtcaatttctgctgcatcgagcgcccgagaaccatagtgggcaccaatgcgggctccaccccgtctaatggtagcgggtcttgggttttcctggctgtctccacaccctgccacccctcacctggctcccatcctgggtgcttccatagcctgtacccctgccaccttcacccctgccgcctgcacctgccaccttcacccctgccgcctgcacctgccaccttcacccctgccgcctgcacccctgccgcctgcacccctgccgccttcacccctgccgcctgtacccctgccaccttcacccctgccgcctgcacctgccaccttcacccctgccgcctgtacccctgccgcctgcacctgccaccttcacccctgccgcctgcacctgccaccttcacccctgccgcctgcacccctgccgcctgcacccctgccgcctgcacccctgccaccttcacccctgccgccttcacccctgccgcctgcacccctgccgcctgcacctgccaccttcacccctgccgcctgcacctgccaccttcacccctgccgcctgcacccctgccgcctgcacctgccaccttcacccctgccaccttcacccctgccgcctgcacctgccaccttcacccctgccgcctgcacctgccaccttcacccctgccgcctgcacctgccaccttcacccctgccgcctgcacctgccaccttcacccctgccgcctgcacctgccaccttcacccctgccgcctgcacctgccacccccactggccctgctgtgctgcttgcgggtctctgggccaggtcaggaaggctcccgcctccacccaccctctggagccttctcagactacgcagcccctcacgccctttctcttttcagaagtctggtgcttttctgtaattttaaagataaacagtatgaccccaaggaaagacaaacccctttctcccagcgccctcccccagcactctgcaggccacagtgctgagggctggagtccgtgtcatcctgcaccagccccgtcatgctatcagcaggacccgcctctggtgccagcacctggaccaccgaggcttacgtcacagagtgtggagacttctttcccttctctgactcatttttcatgagactgcattctccagagccgaccggctgggtctagggagcagaggtgcccatggctggaaggaaggcacccatggctaggagggcggcaccccattggatgctgggatctgtgggctcactgtggccttcacactctgccaggccctcctcacccaggcactggccagagaagcgggtctgcgtctgaaacttgggaaccctgagccctgcttcctcctgcttgaattcattaaaccagggtccaatgaacttggaaaccacacatagggtcgcagggagtcctcttcaatcctgcctaagtggagggctcactttgaggtgtgacctcctgattgacccacagccatgtcctgggaccacccagtacacatccaattcacgggcggaggcactgcagccggaccccacccctcatgcattcctgtggaccgtctcctcctccccggaggccgtcagctccatggtgcctccgggtgggtgagggccgtggactgtgcatgaggaggaatgtgcctgtgctgagctctgggcctcgtgtttccacagcacagcatggccgtcccgcctgattaaagtattgatgcggcctggacgctaagcatttagctgccagacgtggtgtgagtatcttcccgtctgttcacttcttactgttctgcacttatcaggattcaggagcgtacattttcgtatctgtgaaaagtgctcctttccacaaaatctctgctatgctcaattctactttctgatttttttctagaatttgaatttttaaaacgacttattcgacctgtctgatgtttattttggtgaaaggagtaaaatatagcgtggcttccaggttctgcccagaggcacaaaacccccctccacagcctcctctgcccgggtcacattctgaaggggtctgggctgcccagaggcacaaaacaccctccacagcctcctctgcccgagccacgtactgaaggggtctgggctgccttctgcctccccagtgccctgatccacatctctgtcctcgtgaaacaccccacagggctgacaagaatcacatgccgggttgtggacagaaagtagttatgactgagcagtaaccaggctgcaccctggacacatccttgctgctaaaagtcacttggacccccgtcactcctatgatgggcctctgacgtcagaaccctaaggctttggttgaaggatcacttaggatatttttcagaccctgaatgccagcaaccagtgcggagtcccccccagaggagcgggtagggattggcccaggaatgccttcccaagaccctgcgctcttccacacttccgtcctctccaaaaccctcgagacccctatccccaaactcctcagggaggtgggtctgaggctgtatccccatctcctgctcagcaaccctaggattaacccttcctctgctgcagcctagcctctcagtggacggacttgccgtgtgcgtcgggctcatgcctgcaggaccagcaaaccacacacactgctggggttagtactcaccttagtaattacacatggccacacttttgtttattattttaaatcaactttgcttctctaaatagactctaatgctcaaggtaggttccacttttctattccacagcatttaaagatttcccaaatacaccttaggactcttaacagggataattttttttagcagacaattttttttctataaacatgaattggtattctaatatggttctattgttctgaagtcagtatgcgtttttgtgtgtttgtttttgcaggagtgtgtgtccacgttttttgtggaagtagaaaaatgcgatttatctgtgagcacagcctagaggccagacttcgcggcagccacgaccagggggacagtgcccactctgcactcaggggtgtgtggccctggacaaggttcatgtaaaccaaaaataacattctaagccccccaaccgactgaatgggccctcctctcggccaagggccttctgaagtatgcctgaaaaacgagtttggtggggtcgggggtggtagggggcaagggtggacaggcctcatcatcccctctccctttggagctcaggcacaatggaccagcatccacatgaaaacagagctcttaaggctgacagagtggacgctttgtagccgtaagacaccaagttccagcctgactctagcatagcatcgcatgacagatagcaggcctgaaagagatccaagtatttcatacccaagtatctttctctgacatattttgaaggggcccgcacagctgtctcttgtggggaaaatccacatgctgtggagaatgcccttttccctctccagggcttttccctgagccaggggagaattaaccaagagtctggtgcctttttgtctgagaagagctcggaagccggctacctggaggcttcatctgcaagataaaaaccttggtctccacaactcctcatctaaacccagacattcctttctattgattccaggtctttagataataactctttcaacaaattgtcaatcagaaaatcttgaatctaccagtgacctggaagcctcccctctgagttgtcccaccttctggaccaaaccaatgtgcaccagacatgcattgatgtctctgcctgtaactcctgttcccctaaaatgtacaaaatcaagctataaaccaacgaccttgggcccaagttctcaggacctccaggggctgtgtcacgggtcatgctcctcacacgtggctcagcatcaatctcttccaatagttacagagtttgactgttttcatggacagtcagaaggtcccggctctggcttcattgcacgttgaaagggaatttcatgggctcattcctgaagagcactcaggcgcctggcatgcatcagatgctgaacagacattatctggagttactgccaagtggcttcacgtcagggcatgggaatttaaaagcaccacgtttaaaattggctcaagtccttccctttccttgtacctggagcctgtgggtctgtctgtcctgctacaaacctggaagaaaatatccttcggtcgtcccgccaccctggaagtcggccgtgggccactggtgcagaagcagcgtctttcctttctcctaaagtaacgcaagtaaacgacacgtatatttgaaagttgcaagacagtctttcaccatgagataagaaactccccctctgagctctgtgttcctctccttaaactgcttgctattgccataagcagctgtaaattaacctgacaatgttgtaccggccactattgccaaattctaaagcttaacaatctacagccaattaataacttaagttattttaatgtaaatttttggcaaacaactcaggaactgcctcttaattccctttaaaaacccacttggaactgcctctgattggagtgcacgttcagcgccgcttgaatcgatgcttccggattacaaccgtcaaacttggcccaggtaaactctctatttacaccagttttgcctcagcttcttccttttaggttgacaccattttgcttttcattttgttatagtaggtagctagtcaaacatgagtggggcaggagaggccccccgccccacaccaggaacttcaggcaaccatcaggtgatggtcaggcagctgttaactgtctctctaaaataataactggtctcagccagcaccagggaaaggccatctcccaagagacataaaaaacctaaaactggtaatgagtagcttcccgataagatctcaggagttgggtgagcgggctcaagcacgcacactgagaggcaaaatggcggagtttcactggtctatgaccttcctctaggaacaccgtgactggtaagggaccacctcaactgagcacgtgcaaaactccagtaaacacactgggcatgcggcccctcccaagtgcaggcagccaccgtacacgtggacagtccactgcaagggaagcatctggggagaaatcatgcaatacgctggaagtcagccaatgtattgagacagccaggtgggaaggggtccccagagaatctctgatcagctgctcactgggaggaatgtgcactggggtggagccacagaggctcacgccacttgcagcggggaggagcctggcccctcctcctcctgggtgaacctgggattcatttggtgaggtgggaagtgcactggcaggaaacactctctcgcttcactaagagtctctgtttcccttttttcttcctttctacccaataaaatcctgcctttctcacccttcaaattgtctatgagcctcatcttttgtggcaatgtgacaaggaccccgtctttagctgaactgagcaaaagtcccgcaacagtgtgagacccccaagtcaaaggtgagccatgcacgtgatctctcaggtctcccgctcggcctcttcccagtgtactttctttcctgttctaaagctctttgataaactctcactcctgctctaagacttgcctctgtctctccttctgctttatgctcctcagttgaagtctttcttctgaggaggcaagaactgaggttgctgcagccccctgtgggtttgccgcaggtaacacgctttgaggttgctgcagccccctgtgggtttgccactggtaacacactttgaggttgctgcagccccctgtgggttcactgctggtaacacactttgaggttgctgcagccccctgtgggtttgccactggtaacacactttgaggttgctgcagccccctgagggttcgccgctggtaacacgctttgaggttgctgcagccccctgtggatttgccgctggtaatgtactttggtggtgtgtgactcaaatatatctgctgctaagaatttggctctatctagttacagatattgcagctaaatttctgaaatactaagtcacaaaaagtctgcaactgctcccctaacataattgagagctttttcaatgacatggaacatctaagttggtttcatggctctaaatcaatgtgatgaaaagcacattagataaaacttacgggaggcagtgagagccaatctcagagggagttcaccactgtaaatgctgtattaaagaaggatctcaactcaataatcaactttacatcataaggaactaaaacactagcagaaggaaggaaataatagagatcagagcacagacaaaaatagataacagaaaaacaataaagaaaatctactgtttaaaagttggttcttcaaaaagatcaacaaaattgacaagcctttagctaactgacaaaaaaaaaagaaagactattcaaataactaaaataagtaaggcaagtggagacattactaccgacctcagggagataaaaaggattataagaaaatcctatgaacatttgcacaccaacaaattagataatctagaaaaaatgaacaaatccctccaaacacacccagactgactcaggaagaaatagaaaatctcaacagacttataataagagattaaattagtaatcaaaagcctcttaataaagaaaaatcctggactatatggcttcatcagtgactcccatcaaacatttaaagaagcattagcaacaatccttattgactcttcaaaaatttaaagaaaaagaaacactcctgggttcaccctatgaggccagcattactctgctatcaaatccagataaagacatcacaagaaaagaaaattatagatcaatatcccttatgaatacaggtgcaaaaatcctccacaaaagattagcaaatgaaatccaacagcatattaaaaagatgacttataatgaccaagtaggatttatgagagatgcaatggtggctcactgtgtgcagatcagtcagcgtgatgcacagtattcagcattaacagaacaaaggagaaaaaccacacaaccggctcaattgacagagaaaaggcatttggcaagacccacactatttcatgataaaaactctcagaaaactagaaatagaaaattcctcaacatgataaagggtccttatggaaagacccacagctcacgtcacatgcaatggtgaggctgaagctctctcactaagaccaggaacaagacaaggccactgcttccactgctgctattccaccagaggctctggccagagctactggacaacaacaagaaagaacacggtgagaaggcagccaggctgtgtgtgctatactggaaaagaagaggtaaaactatctctattcacagatgacatgatcctatacagagaaaattcttacaaatccacaagaaaactattagagccaattaatgaattcagaaaagttgcagggcacaagatcaacacacaacaatcagctgtgtttttattcaccaggaatgaaaactccaaaaatgaaattagaaagaaagttctatagactgagctgtgtgcccccaaaattcatatcctgagactctaaccctcactgtggtggtatttggcgacagggcctctgggaggtaattgacgttagataaggtcacgagagtggggtcctcacaatgaagttggtgcactttaagaaaagacaccagagagcttgctctctccttctgtgtgccacatgaagacacggtgagaaggcagccaggctctgtgtgccatgagacacggcgagaaggcagctaggctctgtgtgccatgagacacggcgagaaggcagccaggctctgtgtgccacatgaagacacggtgagaaggcagccaggctctgtgtgccacatgaagacatggtgagaaggcagccaggctctgtgtgccacatgaagacatggtgagaaggcagccaggctctgtgtgccacatgaagacacggtgagaaggcagccaggctctgtgtgccatgagacacggcgagaaggcagctaggctctgtgtgccatgagacacagtgagaaggcagccaggctgtgtgtgccacatgaagacatggtgagaaggcagccaggctgtgtgtgccacatgaagacacagtgagaaggcatccaggcattgatggccaggaagatgttcctcaccagaacccagccacgctggctccctgatctcagacttccagatccagactttgataaataaattaagccatccagtctatggtattttgttatggcagcccaagctaagacagaaagcattcctgtttataacagcaccttaaaaaattaaatacttagtaataaatctaaccaaagaggtgaaagacttacatgctaaaaactataaaaggttgctgaaagaaattaaagatctaaataaacaaaaagatagaccatgttcatggataggaagccttaacattgttaaaatgtcaatactacccaaagcagtattcaacgcaatccctatgggttacaatagtctttttaaaaatatatataattttaaaaaatgatcctcacattcatatggaattaaaaaactgatcctcaaattcatatggaattgcaaggggccccagacagctaaaacaatcttgaaaaagaacaaagttggaggacccacacttcccaacttggaaacatatgacaaagctacagtgactcaaatagcatagtgttggcaaaatgataccatacaggccggtgaaatagaatagagagccccaaaataaatccctgcatttctggtcaaattattttcagcaacagtgccaagaccattcactagggaaagcacagtctcttcaagtggtgctggaaaaactggatatccacatggaaaaggctgatgttgaacctttacctaataccatatgcaaaacttaactcaaatggatcaaagatctaaacttaagagctaaagctacaaaattcttagaagaaaataatggagaaaatcctcatggtattagatgtagcaggaccagggatatgacaccaaagacacaggcaacaaaagaaaaaatagataaactgaacctcttaaaaattaggaacatttatgcatcaaatggcatgatcaaatgagtgaaaagttaacccagagaatgggagaaaatacttgcaaatcaggtatctgctgagggattaatatgcaggctctgtcctgaggctctctggcatgaacctccgtctgctacggccctcactgtccgtgggctctcccttcacaggccccgccgcacaccgcaggttggtaggaaccgcatatctaggtcagccaggactcttggtcacaagcagtaaaaatctactctggtcttcctgggcagccagaaaatgtgctgggcagcgccagtgggaggctaagccctggggccaggaagctgcatctggcccacaggatggccatgtgtgggttggcaggttggcaggttggcaggtcggcaggccaggtggagcagccttggcttgcctccgtactctccagtctggctccagaggcagctctgcacagagctcagacccaggcttcctgggggagccagccgaggagggtccctttgcctagaccacactggatgaggaggcagtcccccggaggaggccagcatggggagagaggctggggtgggctggacagcccagaggccccgacacagccttttcaaagtcaggccaagaagctgccttgggcatgcatctgaggatccagcgcagcggcttctgtagccgcacccactgtctctgcctgctgtctggtgccccactcccgtcctcctcctcccactggagctttgggttatgcagctctgcttctcttagaagggccccgttttgtgggttctctgtggctgactcctgattcctggttacagctgaggccagcagaagagagctcagagtgggctggtctggctcagccctggtctggagactgaccccaacccgagagtctcagcctctttccaggaggagcgggatgcctccccatctcccagcagggagctgcatccacagacctgtgagccaggagcacgaagccttcaccaactccagcgcctgctcaggaagcccagtccacaaggctgaggcttgtcctgccagtctgtgcccagcgagaagctggccaggctcctgctcttggagaggcctgcaggaccactccaggacccatgcctagcctccctccaacagccctagaaggaggtgcactcttgggtccacttggcccctctccttcaaccgtcctccctgggttgccccatcccctgggccttgggggctccactccccgccaccccactctgccttaagccgccagaggcacctgtggcccagcccccgccccctgccctgccctctgcttgctgttctcagggccaccctctctcatggcaggtggggcctgtcctccctgcctagaatccaagcctcttaaggcagggactgtgctggcctcactctacccgctgctgtgtgtctccagggctgagagcccctcggtgcatgtgtgttgctgggagaggtcaggtctgagcaccgagtccagcaggggcccccgcagtgctgggacttggagaccccccttaaccccctcccctcctcggctggtgctggtgcaccctctgggaggcctgtggggtctgtctttctttgggagtctctccggtcctttctggaagacccactagaggcctcagtgggagtcaggagccccctccagggctggtgcacctgctttctggcctctgtcttgttgatgatgccgatgagcctcttcagggcacccttggccttcttcctgtagacggctgaggacagcagtgggagccaggcgttccagtaatgccgcgcggccagcatcaccagggcgctgctgcccgcgatgcctccgaacctaaaagagggcaggtcatgacgcggtggctccacctgggcccacctggagctgctggaccaggagggacaggaaggtcgggcgcccagggcccagccacacgctcgctccctcctgggcatgtggcttgctcaggagtccctgctgcatcctttccagtgggcctttctgggcagcacgaggtcagacccccaccaaggccaggctgtaggagcccaggtgggtacaagggcaagagggggccgctgcacctccctgaagactgtgccctgaactggccgcaccggccacctcccctcgccggcaggagccctcccttgggcccacaggatgggccacagccttggtgagcacaggggtcccgcacggccggggagggacagagcccaccccagccccttagagccacacacctggcgctctccgtgaaggccttggctgccaccagtcgcagctgcttccggcccttcaggttttccatgatgctcctgccctggatggccgtggctgtgcacagcatctctgccaccagccgggactcctcgctgcaggaacagggccagtgaggagggaggccactgtggcccaccttgggtcctccctccctgggtcactgtcttgaactgtggactacacaggtggtattctaagatggggcacctcctggcccacaagcacatgtgcacagggctccgccctccccgaatctgagtcagcttcagggacttgctagactgcagggatgcagggcaaggggctcctggtcttctgaggcctggagtgcccacgtgtggcctgggtgccggagacagccgccctgggaatgctctcaaccacggagctggcagtcacatggcaagggtgggagtgggctatggggacatccagctagtggaccctcaagactgtcaccccagctgactctcacagtaaccttatgagcgaccccaacccaaaactaactagctgtgtccagtcagcccccagaaccatggggcagaatcattaactgtttttttaatgactaatctttagagggacttgtgcagcaacagatccacagaaccagcccctcttttggggcctctcccctctaagagccctgctgcccaagcccacatggaagtctggccccagaaggtccactctgcacccagagcttggccaggtgcacactcctgggtgtcaacagcagcatcagctccacggctcctcatccctggacgttcgctgctccagggctgccgtggctggggctgcaacgccacacacactaaggcaggattctcgccatggatgggggagcacgcccttgcggctcagctcagaggaggcaccagatttattctatgagaaagatgctggctcacgggtagactcccctcatgggccagggtcccagagccaggaatctgcttgcaggagcagacagccacttctgcccctctgtcccaaaggagtcaaaggaggaaggcgctgccccttggcctgcatgggcctgcagtgcccaatgcaagccggtggtctgaagctgaaaccaccttctaaggcgggcatggcgacctaggcagggcaggaaggagagttcagtttcctgggtactgccgtcctaaacattttgatctgggttatgcagttgttgagtgttccataaatgccaatgagtgaggtctgttccttccatctgtagcctcagtgacttcccccctactttgttctgtcagctgctgagagaggaatgttaaaatctacagctagaatcgtagacgtatccatgttttacttcctgtattttcaagctctgctattaggtgaacacacatttagcatttttatgtcttcttgaagattgaatccttcatcatgaggaatgtctacctcggatcgcgtgcctgggccgtttaaccggacaccagctttcttgtggttggcacttgcagagtgcctctctcccatccttttaccttcaatctgtgtctatacatttgaagagggtctcccgtacgtagtttatcattgggtcttgctcctatgttctgtatctgtgtctttacatttgaagagggtctcctgtacgtactttatcattgggtcttgctcctatgttctgtgagataaactgcattttaactgcagtgttggttcgtttacgtttaatggaatgactgatatgggtcaaatccaccatttggtccttgctttccttttgacttacatgttctttgttcctttcttccctttttttgcatgaatggaatattttttagtatcccaattcatatcctctattagatttttagttacatctctttgctttattccatttgttagcatttgctctagggattgcagtgtgcatccttcaccaaccacggctctacctcacctgagtcctactccacgtcacgtgtggcacgagggccctcggaatcgctgcctctcagcccgccctgtgtgtttccactgccctgcatcttgcctctatatttatgaaaaatcccacaataggatgctatttttgctttaaaaggtcaagtgtttcttgaagaatttaagaactgaaagggaaaaaagtcttttatgtttacccccaaatttaccatttttggtgtttttcatctcctctagcatgtcctcttctgaggatctgctgggaatggatcctcttagctcttattaatcttaaaatgtcttgattctgtcttcatttgtgaggactattgctggcggatatagaattctagactgacaggttttctttttttaacacttaaaaactgtcatcctttgtattctggtttgcatcatttctgatgagaagtcagcagcagctcttgccctggttttcctgtatgcacaaatccgtccccatgctaactcctttccaggatctgctcccggtctttggtcttcagcaatgtgactacaattcccccacgatggagccaggtgtggttttctttgcgtttatcccacttgggattccttgaaagtcttggatctccaggttgatatttttaattcaacttgtaaaattttcagccattatgttttcaaacgtgtgtattttggcctccccctgctgcctctgtcctcctgagactccagttacactcaggttagaccccctgctatggccccacaggtcacagacggaaagctctgtggccccacgggtcacagacgggaagctctgttcatttagtttctccgtttttctccctgtgcttcggttttcatagtccactggcctggattcgaagttactgatcattcttcagcgtccagcctgatgataacactcttccagtggcgtttgcatttcagacactttatttttcatttctaggaattccattcagtgattttattatcggttccattctttattgaaattcctgtctgtacactagttatttccattgaaaatctgattatattgacagtagctgttttcaactcctcatctgctcatgtcaacatacaccacagctgggtctgttggctgttttttctattctactcttttcttcctggttatgagccacattttcttgcttttgcacacatctagtaatttcttactttatgctggacgtcgtgagggctctgctgctgaaagtgtggattgtgtccacttcctttaaagagtgttgggttttgttctgacaggcagttaattactggtggctcagcttcatcctactgagatgtggtttaggctttgttggggtgagtctgcactcaccccattgctaaggtgtgtctttctgaatgcctggagttcagtgagttacgccccaatgtgagctggccacagctccaacttctctcaccccattgctaaggtgtgtctttctgaatgcctggagttcagtgagttacgccccagtgtgagttggccacagctccaacttctctcaccccattgctaaggtgtgtctttctgaatgcctggagttcagtgagttacgccccaatgtgagctggccacagctccaacttctctcaccccattgctaaggtgtgtctttctgaatgcctggagttcagtgagttacgccccaatgtgagctggccacagctccaacttctctagcgcaggatggcctctggcatcttgtcagcgtacagacccctccatccctgttttctgccaggcctggaatctagtcctgtgcacacacagtttaccaccagacaggcacagactcatgggtggctccacagaacgagggccccaccccacctgccgcgtcacatcctggacacctcagctgctacagcctcaagccctgacccatttctccccgcgactcttccatccatctgggcccaagccctgacccgtttctccccgcgactcttccatctgggcccgctctccaggctgcagcatgtgaagctcccttaggcagaatgcggagcccacttccgatatttccttctagcaagaatggctgcctggtactgcctgctgtccaacagctaaaaacaactgtctcacgtatattttcaagttttacagtttttctttttcacagcacaagagtacgatacccattatgctttcaaggccggaactaggtgacttttaaatttatattattaacaacattaaatataaatatattacacataataaatatatgatatgtgaatatatataaaatcactgttggtgattacgttaaataaaaatgttgagctgagttggaaggtccaaatgacactcttaagactattgttctttacccattttgtgtgtattttaataatctacatgaaatgtataatatatattccttgacactaatagcataaatgcgaaactgatttggcaaccacacagtcacaattgagaatatgaactcattcgtaactgctgtacttttcaccaagaacagaaagccatttttgctattagtgtaaaatgctatcataaaagctactctgtggcaaattccatgctagagtttctacacataattttcaaaacggaaagaaattagaatgaagaactgaaatatgtgtaaactttttaaagtatctcttacaaaggctggtcgtctgctggatgtgggcatgggtcctgctggactggggaagggcctgtggctctgacagtgaccagcgaggtgaccacatcatctcctgctgagcagcacgcctgcgggttctctccagtctcctggcacccaggctgcctgcacacaggagcacccacctgcggttggtggaaaggcgccaacactgcgcccagggcagaggggctcccgctgggacgcaatgacaccaagggccactagaggacagcaatggtccacaaaggactttccaaagtcttaacgtggaaatccaatttttccagtctcatatgacttctccttttccctgtcaccatatgtttaaatttacagctttagctaatttaacagaaaaaatgatttttaagtcaatttacacagcagtggcacggccagggcgcccagcccccacatcctcctgttgtgtgccgctctgccctccacacttggggaagtaattgtaactcagttatgaggaggctttatgcagcagcactctgcaccctcacctctatgacgctgtctttgtagtttatttctcttagaaataatgtttgttctgttttgtttggagacagagtctcgctgtgtcacccaggctggagcgcagtggtacaatcacggcttgctgcagcctcgacctacaggctccttacgagggtgaatgcagttcagctcactcagaccccctgcagccccttccaactgacttgtgtggccagtgaccgcatgacacttaatccccacctatcaccttggcacctacgacgtcacgccagcctctcatcttctggtccccactgtgaccctggtgactcaccttcccggtgaggaccacaacacccacgcttcccttagctcgtccttcctgctctaccagcatatgttatctgcgcttttccttcacttttgtattgtcaaaatcaatcctttccttttgtcaaaatgcttctttctttgtcaacaagttaatcctaaaagtggaatatcagtgaacaccatgtttctcattggagagtccggctgtaaatgacttggtttcccggactctctaactggtgtacgcctctgaactgtccccatccgtcctatgagggactctgtctccccgccctccccagggtcctcctgagccacccaatgcagtcagacagctctctccgcacagcgtccatctggggacagctcttgactacctttctaggttgaatctgttatttctagcatcccacatatctttcctttttttttttttttttggtttacttccttgtttttctggatcatatcctcaagaaactttctaaaaatggtgtatgggaagtacactctctgggtccttttgtctaaaatggcttattttgacctgatatgtgactgatggtttgggtgagcttgaattccaggctgacaattacctccacgtggaacgttctattttctttttgcttcaagtggtggctgctgagaaggttggggcagttctatttcctgctcctctgatctcagcctggtgtcagacagagacttccagagacacctctgatcctggcctggtatctcagcatgtccagagccaggcagatgtattttcagcctcagcacatccagggcctgaggggccagggtgggtggcaggcatctcctgcttatgccagagctgcagggctggggacgcacccccagccccacctgcaaggaaggctagggagggacatcaaaggaggtgagttttccttttggaagcaaattgatttttattacaggctgcagggaaaatgtaacctctagcctccaacagagggatgccaaagaggggggcctggcatggaatcctgtccatactgttttggaagaaagatcatttgcagtgaaaagcccgtcgatgttggcaaagagaaaacagcgggactgggctccagaccaactctgctccggccctttgctgccacgctctccctctagccccccttgtgaacgtggggcaccacgcatggcagtgccaggccagcagggcagggtcccaggtgcacagctcctggcagggctcgcagcctcctgagcactcgcagtctcacccctgccaaggcagtgcttatagcccatcgcctgggttcagtcccagctctgccactcaccccagctgggtggcctcagaagcaacttggcctctgcctgcccatttcctgctctagagcctgggaacagtagtgcctgccaaccgagaagagtgaacggggtcctggcgcgtgatgccccgtcctgggcactgagaagagtgaacggggtcctggcgcgtgatgccccatcctgggcactgagaagagtgaacggggtcctggagcgtgatgccccgtcctgggcactgagaagagtgaacggggtcctggcgcgtgatgccccgtcctgggcactgagaagagtgaacggggtcctggcgcgtgatgccccgtcctgggcactgagaagagtgaacggggtcctggcgcgtgatgccccgtcctgggcactgagaagagtgaacggggtcctggcgcgtgatgccccgtcctgggcaccgagaagagtgaacggggtcctggcgcgtgatgccccatcctgggcaatgagaagagtgaacggggtcttggcgtgtgatgccccatcctgggcactgagaagagtgaatggggtcctggcgcgtgatgccccgtgctgggcactgagtgaatggggggcctggtacatggtatccagtcctgagcactggcctgcttgtgcctctgagcacccaggagaccccggacacgtggaagttgccgacgtgaaaggcatcttggcacgttcctatgttggcctcgcatccccacgggtgtggccgacacaggccctggagccgtcctggtgtgcagggctgtgggaagatggggcgtgggcctggggcgctccttgcctccggcaggtgctgcccacgctggccatttggccacagaaaacatcgttacagcctttgggtcagcggtttcatcttccaggattattagacccaggaaattagccaaaaagaacctcaaggaaaacaacctttactgcagaaacatttacaatagcaacagatggaaaacagcctcatattcaaaaattggggaaagattagggatgataacaattgctcaactggatggaacacggtaagccactaaaagtgagatccgtgaaaattaaagaatgagaatgttctgtgtccagctatgctgacgacggggacctggcggcacggctgactctggagagtgagcgagggacccaagtcagaggccattttctttcattgaaattacccttatttattttcaaatttaattagcgtgcatatctgtctattcaaaattacttcaaagctgtatgtcgttagaaatggcagctgtctacctgctgaatgtccctatcccctcaaaattcccttcgacctgccatgggcggagtgtccgtgtcccctcaaaattcccatgctgggcgatcctcacccccacagtgatggtgttggggtggcctttgatggcctttgaggggggttggatcatggggatggagccctcacaaacagggttagtcccttatgaaagggaccccagagagccctgccccttcccgcatgtgaggacacagcgggaggcgccgtctgtgagacaggaaggggccctcgcagacgccgaatctgccacacctcgatggcacttccagcctccggaactgtgagcaggaaccatctggggtgggagccccccggtctgtggccctttgtcccagcctctgaaggctgaggccccccctttctgtgcctacaatgcacacgcggccagcaggccacacacccctcctgctgaggcccacgtgacttcagaatccttcctgaccagctttccacggggccactgctgacttgtccatgagggcacggggccggcaggacggaggctgcctgtgcacatggctgaggcctgtgggaagctttctggactgggcctggagacctggtggagtgctcacctgctccctgatctgtgatcgccgcccaggcccgcgctccctgcccgttttggggacctggtggggcgctcacacgcgccctgatctgtgatcgcggcccaggcccgcgctccctgcccgttttggggaactggtggggcgctcacctgctccctgatctgtgattgaggcccaggcctgcgctccctgcccgttttgagggaatttgtccagtcatgagggttacttacggcccaaatttcttcaggtacttgatgcccatctccagagccctgtgagcacaggccatggtggtctcatggtcacgcgctgcatgggcgaagtgggtcagccgcgtcagggtctgcagctccaccagggggtccgaccagttgcactcggaagccattttcaccaacttccggtgggtggcaagagaaggggcaccgtgttagcaacaacgaacttcccacggcctgcagcccccacggaccacgcagcgcatgtgatcctaagcagaggcgtggcctgtgaagggccaccgtgccacaaaagctgagctgccacgtccgtgcctgtgaggacccctgatgtccttgtagctcccacaccccacagggtgtcctggacacgggactggcgtgtgcagcccttggctgcccctgagcggctcagggttgggtgggaatggagggtccgctcaaacagcgtttgcctcgcaccaggagacagggatgctctgagcatggagctgaaggaagtgcgtcgagggggcgcagctccgttgggaggtgggggagagcggggcagagtgggggtgagcatgcacgatggggctcgagttccagccacctagggcaagagcctcggcgtcctcgcctcttggcccctggcctcccgggacccctggggacacctacctgggccagggaggggacagtgaagtccatgaggcccagcccgttgcatgagtacatttccaaggcaacgaggactctggtcaccgagctgacatcctcattggtgccctggtggggaggatgccctgagtgtatcagcccaagcgtgcggggggagtctggaatatgcgtgaatttaacactgcaaggtattagttttatggcaataatcagaccacaaaattgggagcgtttataccttaggctgtttttgtaactgttgacctgcaggtcatcttctcatacaacgaggagccccaagtccgtgcggcccccatgtgtgaggcagccttgtctgaaggctgggtgacccccgaggagggaaggaccagtgggcctgacatggtggctgctggggcaggcaggtcaacacctggaccctccccgcctccctgggccccactagggcctggctcctggccaggctccaaggcccctcctccatctggctttccaggagctcatggggccggccctgggcccactcctccttgggagagcgcagcacccccacaggcccagcagctcacagaccccgtggacgggtgggcagaggaggccccgtgccacactcaagggcagccagcggcggtgagctcagtgggaaaagggagtgcccaggccatccgtgatggctccatctggagctaagtggtcccgggggccccaccacccccggctgtctcagatctctatgtccacagggcctcagtcagagcccagatgtgggcaggggcgcccacctgctcctcggtgcccagccgtggcccaatctgctgctgcagcagctgcttggccttgacccaggtggcgataagctgctgccgggtgccggtgggcaccgtctcctcgggcgcactcccattggtcaggttcagggcaaactcgcagacctaggacagacgtgttctcggtcacgaaacctgaattctaaacaggggaccttgagccaagatccgaaccattaaaagatggatggagcccgctcctgatccagcccgtgaagggccttaaacacgagacctcaggcccaccagcggctgcaccacaaacccagcagatgaagccccacccccagacgccgaggacgcagctgccacctggcctccagtgcgccccggccctcactcctgagctgtccccacggcatgggcctgggaccccgcaggaaggagcagctgagccagcacccctcccccactgcagctggtatcggttgggggtggggcagcaaggacggagccccgaaagtgggggcgtgaaatctgccacgtgctttgcctgcagtgacgggcatgtgggctgctgccctgagcccctgggctgcgccccagctccctgtcttgctggccgtgtgaccaggtgagtttcttcatgctgtgcgcctcagtttcctcatctctatgtagaaatgaaacccagtctatgggtcgtcgtgaggatcggtgagtccttgttcagagcctcgcccggtgcaggaagcactggccaccgggagtgacctcttgctaacccagggatgtcccatctctcgctgccttgtgaacacctgctccttgcaaaacgtcttggtagcacagacacctactgggcagcgtccttccctttcctcccctccatccttccttctggataaacttccaaacatttgtcaagttccacacagccatcccatcggaatgtgtttggggagcactcactcccctgttcaccacctgactccccgtgcggttgtgcacatgcccagtccaggcaccgcccaagccggcttcctcacactctccgccattcactccgtgttcccgggctgccaagtcggtgctggcatttcctctcagcatctggatccagccatcatcacatctaagagggaagctcctctgcaccccccagctgcctcccagggcccacagcaggctcagctgcacccacagctgcctgagccgcccacggcgccctcccctccgcagcctccagcctgatccctgtaggtccccggagccggccccttgtcccttctcggaagaacgacctgcacctgatgccacagccggtgttcctggccggcccacactgactgcccagggccagccgtccccactgggagctgggagcactagggccctctctggctctggcctggcgcagctgactgtgagcgttgtgagtgccgggccgcaggctcaagactctccagcccgcggttttatccatggcccagaaagggtcatgcaggatgagctttagcacaaagtcttccgcaagggtggggacagctcccccgccccgtgcccctgcggagacactcaaggcctccctgcccccgccccaccgcgggtgctccacacacaggctccaggaggttccccacagactcccttgactcattaggaaaccggctttctctcgggttctttgaggctcttctgagttagaaatgggcaatggctcatcaaacacttctgcagcatctgtcaacgagaacactatttcttttcccttccttttggattacaacaaaatccacattccatgggataaatgatccgcctgggccaccaggatcgtcccacacactgggtctgctgcattttactgggacggctgcatgtgtgggtggtgtggtccctgtttctcgccgttccaatccgccgtttctggttctatttccactctcctctaggcctggagcccgccctgaggggaggcctcacacccacccacgggtcttgttttcctctctccagccctggccttatttcccagtaactggagcccctgacgttttacttcctagattgttctcacgtctgtcgcctccactgaaggcagtttgctctcccagggcctttccaggagccttcagaagctcagccccagcctccagctacaggtctgcagggctctgtctcaggtcagctgcctccctgctctctccctccacccccacccccccacccccacatctctctctctctcctctctctcttctctctcctcctctctcctgtcctctttcctctctctctcttccctctcctctctcttctcctctctcctgtcctctttcctctctctctcttccctctcctctctcttctcctctctcctcctctctctctcctctctttctcctgtctcttctcctctcttcttctctctctcctgtctcttctcctctctttctcctctcttctctctgcttctctcgcctctctctcctctcctctctctgctcatctctctctctcacctccctctctcctctcctctctctctctcttcacctctctctctcttcacatctctctctcctctttcacctctctctcctctcctctctctctcttcacctctctcctctcctctctctctctcttcacctctctcctctttcacctctcctctcctctctctctctcctctctcctctctctctctctctctctctctctctctcggcatcatggaggtggtacctccaccgctgttttgatctcggaagtggctcctgcgtccagtgggctgtgaaacgcgtttggtcgcatgaatttcctggacttctcggcagcctggactggaatccagctgatgatcaggcctcgcgccaaggtgttgcagagcgtcaccagcatcacggggtccctgggagacatgcttgtcagagggaaccttggcccccgcaggcctcgccccgatcccatgtgctgagtcctcaggtcacggtaagaggcctgagatgcacgggtgcccacgaccctcctctgctgggacacagagggccatggagtgcagctgcctgcctttgctctggggtctcccaagggaagaagcccctccctgcgtgaacgcagcacagcccacacgcacccactgtggcctgtggccttaacgatgctcaggaggtggtacagggcgtccaccagctccttctgccgcccggccaggatcaggtggtggttgtggttcaggacgtagaccacggcgttctgcacaatccacgcctcctggatctcctgtccgatctctgcggagcgcagccagttattcatggcacaccgggacagactctcgatccaggttctgcaaaacgagcaccaccaagcccttaatgcagggtccccagccccggggccaggcaccaggaaggctgcggggcctgttaggaaccaggctgcagggcaagaagtgggaggggcgggtgggcggcgaccaaactccatctgcatttacagtcgccccgccgctggcactcccacctgagccccgcctcccgtcccatcaacagctgcattccagtctcacaggagcgcgaaccctattgcgatcagcgcattccaaggatctaggccgcgtgctccttgcgagaattgaacacctgatgatctgaggtggaaacgtttcatcccgcgaccagcctccacccagccagtccgtggaaaaactgtctcccacgaaaccagtccctggggctgaaaccgctgggacggctggatggtgtctaagtgtgagacggtctttccccacccgccctcgctaaagagagtgtggactcttcctatgagactctcttgtttccggaagtctgtggagccctgggctcagaaaggggctcctgtgggggctgcatggggcagagcgtctctgccccacccctccacccagccccccgccggcctgcgcgctccacctgaagcctggcctggtgctcccctttcccagcagccccctcgttccagtttgtcctcatcctccctggacacctccaacagcccctggctggttcccgtggccacgagtgctcacacctgccatgggacccccgctcacccctgcaaacctctggcccccgccccgaggctgtgtccagccacactgcaccccggcccgaggctgtgtccagccacactgcaccccggcccgaggctgtgtccagccacactgcaccccgccccgaggctgtgtccagccacactgcaccccggcccgaggctgtgtccagccacactgcaccccggcccgaggctgtgtccagccacactgcaccccggcccgaggctgtgtccagccacactgcaccccggcccgaggctgtgtccagccacactgcaccccggcccgaggctgtgtccagccacactgcaccccggcccgaggctgtgtccagccacactgcaccccggcccgaggctgtgtccagccacactgcaccccggcccgaggctgtgtccagccacactgcaccccgccccgaggctgtgtccagccacactgcaccccgccccgaggctgtgtccagccacactgcaccccggcccgaggctgtgtccagccacactgcaccccggcccgaggctgtgtccagccacactgcaccccggcccgaggctgtgtccagccacactgcaccccgccccgaggctgtgtccagccacactgcaccccggcccgaggctgtgtccagccacactgcaccccggcccgaggctgtgtccagccacactgcaccccggcccgaggctgtgtccagccacactgcaccccggcccgaggctgtgtccagccacactgcaccccggcccgaggctgtgtccagccacactgcaccccggcccgaggctgtgtccagccacactgcaccccggcccgaggctgtgtccagccacactgcagctcccttgagcctcctggcttcgctccacactgtgaagcgccgccctcccttctgcccaagtgagcgtctccctcttcctccccacctgaatcacatgcaggctctgcccttccccagggagccgtcacaccgagcgcagggcagtcagccctcactcagccgtgtggacgtggacagggtctgtccgtcccgctagaccaggctgggcaaactttttctataaggggccaaatagcattttgagctttgcaagctccatatagtcttcactgtatattttttctattttgttttacaaatttaaaagtgtcaaagccactctcagctcacaggctgcaaacggcttgagccctaattttcagaccctcctctgtctgtgagcaggcccaccaggagtgcagagctctgcccagccttgggcctgggtcctggaaaggcatctggagcccctgcctgaaatgacggggctgtgagggctggaggcccggggtgggcctgggcccggtggctcctcacagagcccggagctgctgcaggagagggatcccaagaggccaagacaaaggccacctgcagccgtcatcgtcattgctgctgcctgaccacctcttccctccaaagagctcggccgggtggctccaggcgtgcatggcaagcagggacagctggctttccttctgccccaagggaccggcgagggcggggcgccgtgcccagcttctgccccgagggaccggtgagggcggggcgccgtgcccagcttctgccccgagggaccggcgagggcggggtgccgtgcccagcttctgatgcatggatagtcggggacacccgagcttaccacgttcgtgtgcttgacgcagctgcattgcagggataagttcccgtgtcctatgcacggcgagcgactatagtttacagggatgctggaagggggacatcgaacattcccaacatggagaaacaacgcacgtccagcgtgacggattcgctgattacccagatctgatcaccacgttacacagatcaaaacgtcactatgcaccccaaaaacggtaaaattcttgtcaattaaaaaaataagttaaaaatatttaattttatattaaaaataggtaaaaaccatcattgctggtacaagcactccaatttcaattctttctgaacttggaacctcacgtcagcaaatcctgtgagatgttctgtacaaactaaattttcttattgacacacaaggcgttttcgaggccaaggcagtcctcgatagcttttcccacaataggagggagagcacagcttttcctctgagcaaatacagaagctgctccttctattttctgccacgaagaccacctccctagcagctgcctttcacgcatcatcagagggcctgacgagggtgagcaagagggacactacaggacgctggaaaagacactcctgaacgtttcctcgtagtaacagcaaactacgcctggggtcttgcgaggaacgacggctaaaaacaggagaggccacgtcaccccattttctctttcatggtctcagtcatttacgtgacgatggacacgtcccccacgcaagaagccggtgtccttacgaatgcaaagggtgtccctccccacgccagcctgagtgcaggggacactctgacccacggccccgggcggtgctcaaggccactgtcgcctctgcccacctgtatgtgatccactcagcattcacctccgggggctcaggcacgtagccagctgggtgctggctcaggtcttcgggggggatggcccggtcattcagctctacaccttctgaccgcagcaaatgaaccgtggcctgcaaaacacacatgcggtgggaggggtcatgggcggagcacgggcccagcaccagataggaaacacacacgcccttccctcagctctgatttgaaaatgccaagcacaggctgtgagacccgtttgctgtgccctttgcaagctgggcctgccccaatagccactccagggactaaagccagctcctcacagactctctccacccattagcacaagggtcagggaagagaaggtccttccagagcaccgcacaccccagcagccccgaaggaccaacagtggcttcccggtatcagcagacaccggccagcatttgcacctcccctacgtaatcattacgttttaaatgtttgaggggaaaggtctgcgctggcctccggggcgtggatgaccatgtggcacagccccgtggccgccgctggctctggttctgccatgtggcctccggctccctgagcagagagttctgtgccgcttctcaccctgaccccagctgagggcatgggcctggcacctgggagccactcagcagacatactgcctaaatcggcaggtgccctgtcctccagggctgatggccacgcacccactgagaaagtccacagaaacctaaccgagagtggctctgggaactctgaagtcacacaatgtcacaagggccacacttgtgttggtgcagcgcggtggctgcgagctcggacccgaggtcccagggctgggtttggatcccactccgccatttctacctgctgactttgggcagggcgagcccgggagtctctgagcctgcgtgggaggaacaggcctggcggccccatcacagggaccctggacatcacgccacattcaatgcgcttctgcagcaaatgccgaggtaccatctccccaccgagtggcggttgccgtgtgtcatccacacaactgcagattcaccactcagaaatgattcccaagagaaatttacacccatgcacactttggtttatatttttctcctagaaaatctcccaagaatccaggaagttttccctccctcatattcattttgtttgaagcacagaaggttctatgacaataaatatctgcagtgggttaacaggccacgtggacaccaacacctgccccacagcaggttgtgtggatgcaggaaagcaaccctctgacgctgtggtgcagggacacacctcagcattgataagccccagttccaggatgcacctcagcaccgatgaacccccctctccacgacgcacctcagcaccgatgaacccccctctccacgacgcacctcagcaccgatgaacccccctctccacgacgcacctcagcaccgatgaacccccctctccacgacgcacctcagcaccgatgaacccccctctccacgacgcacctcagcaccgatgaacccccctctccacgacgcacctcagcaccgatgaacccccctctccacgacgcacctcagcaccgatgaacccccctctccacgacgcacctcagcaccgatgaacccccctctccacgacgcacctcagcaccgatgaacccccctctccacgacgcacctcagcaccgatgaacccccctctccacgacgcacctcagcaccgatgaacgcccctctccacgacgcacctcagcaccgatgaacccccctctccacgacgcacctcagcaccgatgaacccccctctccatgacgcacctcagcatggatgaaccccacctccgcgaacttccgcagcaggtcggggcacacctgcctctgcaggacgacctcaggctggctccaggtgtcctgcaccgagccgtccctacctcgcttcttcttccctgagagaaatggcagcaggtaaggatcatgtttttttctagcaaataaataaaaacacaagaattcctgaaccatcttggagtgcctgagcctctccccagctccgtgtagggtccgccaaggtgggcgggtaggcgggaggtgggcagcttgcccaggaagaggctggaggagctctccgtgggatggcggaggtgggtggagtgctggctcccagccagggcttgctcttggccacatccctgcagatgctcttggcacctgtggctctcccaactcctcctgcatcccctgccttcttggggggtgccctccctgactcctgcaggactcccagaccccctgtgcccgttctgtcacctccctcgtccctccgggtcctgattgtccctgagacaggagcctctccagggccgggtgctgattgatgagcctgccccacccatgtcccgctccacgctgggcctgtggccactgccctctgcctgcaggtgccccgcatgggcatctgctcactggctgtggtggcccctgcctgagcctccgaggcccccagtgactgaagatggagtgtgacgacggtgctcgtggctcggccgacacagccagatgtggccgccgccccatgattggcggtcctgataattagtgggaactgctaccattgtgacttagcaatacgctttctcatgcgaaggccccatgggttgtcattgcacgaaccacaacccttcccacacccagagggcggccgtggccaggctgggacacactcgtgagggcgggtacgaacctcgccgcagcctcaacttcttcaccttgacgttgtcatacaggaggcagaagcggctcgccgtccgacagacgtcccacacgccttgtttccgggccactttggccagctctgcccaaatctgtatcctgctcaccgagaacccaaacgagtgaaaggtgagtagacaagtgtggttgctgaagttagaaaacacctgggctggctgcctgagaaaaggccactgtggctctgcagtttcaaggtggcaaggagcccggcactcgcgctgggtacggcctggcgggtgcatgtcccagggtcgggcgcagctctccgctctccctgccagccagctgtgcgcggcacctcccttccctgtggtgagaagaaaggccacacaatccactccccgggggagtgcacgggacaggcctcccggggatggtaccgaccgcagggtcggtaccaaaaatcagcctgctctggtcacaggcgctgcgtgtcctccgagtgacagcagtgacaggcgggacagggcagccgcacacctcataggccgtggctgtcatcacaggctggggggtcccgtctgtggcgggactcccaggcagggacctcgtcccaccatcctggagcaggtggcctggcgagtccccagacggccacatgcagggtcagctcagccgccacagacactggccctcgggctgagcgacccccgggctgagctgtgcgtggcgctctggccttttcctcactcacctctccttgtcgttttcgttgcccaggcgccgcaggtgcccggcagctttgtccacgctgacggtgtggtgccacgccttcgcacagaggtaggtgaaccggcccctgttcttcccggtggagactgagggcggaaatgcaaaggcaggtgttgcagctgctggccaagggccggggacgtgcccatcagtaaccaatgccctgcgccggcgccggggtggccacccacaggtagcggctccaggggccctagatccccggctcccagaagccgagctcctcacagagctgcagagtggcattgcctgtgtctcctgccggcgatgaggccgagccagtgctcctctgagtgggggaggctccaggaactttggagcagagtctgccaagaccctcctgctgctctgctggctgcgctgtccagctgccctccaagcagaggcacccggcctcagactcccgagctcccacccagcccctgcgtagcaccccaagtcccagcaggtttatccgcatgacgccagatgttccgaatcaccgctccttttcctggcaaataatcacgagcacccggaactcagctccacaccctggggggcctcctgtgcatgggcgaccccgggggctgggcctcccctggctggtgtccaccctctcggccagcacaggggttcaccttcaggagccactcaacggcatcctcccctggagcccgtgccgccctcactgcccctgggcagggccccgcagcacctcctgctgggtgtaggtgctgtctcggccccacagccagcagtggacatgcacctgacccccaggcagccagcagcacacgcccatgagtgaaaggagtcaggaaggcaaaacaggtgagtctgggtcctactggtggatctgcagctgctcctcaaactcattagggcaaaatgaaagcacaggtgcggcagcatctgagggcggtggatgacagggcggcagccccttcccgctccaagagtcgccaaccttcccttgcagggcgcgacccaccctgcgtctgcccatctcctcgtctcagacccgagacatgacccagcagctccactcccgaccaccatctccacaggctgcagtctgggtgacacctggttcgtcgtgctgggtgaaagccgccggctgctgggcactgagctggagggaggcctggcagcagcccccagcaggaccctcaggggaccagcgggaagggctcccaagccaggcccagcctggcccctgcactgggctggagagagtggggccgcctgcgttcccagagccactggcgagtgcccagagaagctcgggcagtgaggatgcaacacacctgccgaaccctggctcagtccccgcacatgggccgtacggccccgtgtcccattacccaaagccagctcagggtctccctgggacagatgtgatggcttcagctttgacccccgtgatccagggagccccgtcctgtgcctcaggcagtggctcaaccccattccccagagcagggtgtgttgaagtcctcgcccccaggacttcagggtatgaccttctttggaggtaatttgggtcaaatgaggtcatcagggtggaccctagtccaatctgactggtgtccttccaaagggaggaaacgaggacacagacccccagaggggatggccctgtgaggatgcggggaggagatggcgtccacaagccaaggaagagcactcagggggaatcagccctgcccacgccttgacttccagcctggggctgggaggagtaagttcccgtagtctaagcagcggagcctgtggggtctgtcccggcacacagggcacccgacttgactggcgtgtgcacagaagaccgtcgctgggctttgccagacccggcgggccgagatcgaaggacactgccggtgcaaggtccttgtgcatccagggggcggtggcagggagcatggggactggggaggccccggggcagcctgggagccattccaaggtggaccgttctgggctgggagagcccagtgcagagctcacctttggcctcattctcactgtccagcacaatctgaaacgcgtcaggggctaaggccaggcctgcattcaccaggagggcccgcttcttcctgacgctgtcctttggtgtagctttttttgcctgtgaaaagcagagactgatgagcaaggggccgctggactttccacagcaccttctccaacttctggagcctcctggcctttggcaggggcctgtgtggtcctcgtgctcatagacacagtgacagctcggtcccaggcctccttgcttcaggcagccctgggcggctcccgccctgctgtgccctcagagccccgccccggccccatgctggggctgcagcacccagcctccctcacttccccggggcggcacctgctcaacggccatgatggccttgtcctctgcgcgctcaggggcctggtatagcgtggtgcacagacgcagccgggtggaggccatctggatcctgtcccggtagaggcccaggctgtccaggcgcgcggctttccggaggtgctccgtggcgggctccagccggtcctcgtcctcctcgatctgcgccatctccatgtgcacttgacagcggagaagcgtcatgaggctgcgggggtggcgtggcatcaggggccctggcggcgctgcgcctctgtcaggctggggtcacaccctccagaggaaggcctgcagtggccccagagtgtagggcaggcttggtgcccggtgcccctggctttctgccatccttccagtgatgtccctacctggccctggggactcacaaatggggacaaggagagaagcccctgcagaccgcagaggcctcggcagctcacgacggcagcccctggaaggaaacctgggcgctagtgcaagactgcccggctctctgcctggggacaacttcctgaagtgtggggtgtggttcccacaggccacggcggcaggggtcggggtgcagggctgcgaaggaggctagggtctggagaggaagggccgtgcggagcagcccaaccagcccgtgtgggggttccctggaccccctggccttgagcagccatgtaggggtaccccggaacccctggcctcaagcagccatgtgggggtgccccggacgccctggcctcgagcagccatgtgggggtgccctggaacccctggccttgagcagccatgtgggggtgccctggaacccctggcctcgagcagccatgtgggggtgccctggaacccctggcctcgagcagccatgtgggggtgccctggaacccctggcctcgagcagcccatgtgggggtgccctggaacccctggccttgagcagccatgtgggggtgccctggaccccctggccttgagcagccatgtgggggtgccctggaacccctggccttgagcagccatgtgggggtgccctggaacccctggccttgagcagccatgtgggggtgccctggaacccctggcctcacgcagcccttgtgggggtgccccggacccccggcctcgagcaggctgtgtgtgacaggagcctgcgtttgatggccccaggcttgagaagcagttctagacacagctgagccgggatccagggttcattctgtgctgtgggaagtcgaaggaaggcccagcaggggtgtgaggggtgtggtcaccatgttttagggtatgtgtctgtgtgaaatgagctggagtgatgctggcctgacacagactgtgctaagttaagggtgcatgttcttagccccagagaaatcttccattcctccaaaaggtatagtcgagaaaccaagaagccaatagagaaaactaaatagaactctagaaaaattcagggagccccagagaaggtgggaaggagcactggcagtgcaggaaggtagcagacagggagcgggggctgagccggcggactcagagtcaagattgtgctgacggcaacgaagaggctgagccctcccaacaagaaacaggtcctgagatcagggctgtgattctccagccaccctgggcccaggctctgcaacagcttgtggctgcccttgcacctcacccccagtacctgtctcctgcctgccatggtccaccctgatgcctgccgcctgcctgccatggtccaccctgatgcctgccgcctgcctgccatggtccaccgtgatgcctgccgcctgctgccacgctggcccctgcattcctgtcacccctgaggacacaccgtgctcctccctgacgctgggccctctgagcactcctgtctcacccagcatggcccaagtcccacggggccacaaccagccccccactcccggcctctgtggccatgacaggccccttccatggaggctcgagggacacagatgcccgtgaggcaaggccgagcctgcttcttcctctggcgccgccaatgcaccacagaggacccgacgtgcctggcccggagctgggacagagggtggcccttattgagtacagggggagtctgttgcttgtggcactgtcatggcaagggggcttgggccaccttctcctcctctgtctcctcctatgcgccacgccctctgtggaggacacagcacaggtgagcgccccacctgtccagcttctccagcacgtccgcaacgccagccaggggcttccgcaggtggtgccgcaggttgtgctgcagcaggggcaggcaggtgttccactgcgtggcgcacaccacgtggatgacccgggggtcgcccaggcgcacggctcgctgcagcgcgacgtctagcctctgtatgatatccagctgggcctgcggagaagacgtgggggattctagggaggttgctggctcgagctgcggggctggggcggcacctgcgtgcagggcacactgagaacgcaggccctaaattcatcaccctgcgtggcgtcatgctcaaatctgtccgtgaaaatggccagagtgactctttctaggaggaagtggacgtctcacaagatattacatgcaggaggcttggcggtgcccacacatcgtggctgcgcccgcctcccccgtgtggactcagcgggcgctgctcccttcctgatcccgtctctttcctggggcctgtgctcgctacgcttcccacccccagaatgcctcctccggtctgtgctacacgggcccttcccaggacaaaggctttggccaggatttcagtggagcagtctccccacactcccacctcccacaagccctgctggaccgcccaccgtcctgggctcacttggccacgtccccacagcctgtggcttccacgggggcctagccctcacgctgcccctgggctgggtggggcctgaacctcacaactccatcctgccacttggctgctgggtctgaaagcctcgtacgccggtgccggcccctctgaggtcctcagcaggtgagtcggggaagcagccgcacaacccacagcgccacagccacaagcagcctctgttcactttcacaacaaagtgcaacagccaaagcgtctggaaatcattccttaaacgaacactcattaagcgcctaccacgtgtggcaccagcgcacagcagcagtcaaaaacctcccgcgagaagctcagccccacggaggcagacccaggagcaagtccacagcggcatcggcacccgccgggctgtgacacgtgtgccaggcagtgcgggctgaggatggatgcgttaggagtggggatggggaaggcctcccagctgccgtgctcatcccctgccacggcacctctggcactgacccgcacgcccctggctcctctgtacccagcggagcctcgcactgcctggctgacagggcctgagggttcccagccgaccctgtggcacttgccgtggtaccacatcagggctgcaggccaccatcctgtgaggtttctgttcatcttttaactgggaaattattactgaggaagagtctaaaaggattcctagttcctttcctggtagtggctgctattccagagcctgtcgtctcagacagcaggacagaggtgggtcaagtgcctgtaattggcacctgacgccagggccggcggtggcttttgcccctcatcattaggacgccttcccggactcaagtgaggctggcagaaagccctcatgggacgcgtggccgtcccccgtcctcccaggcaggcatcaccacacggcggggagggggcagctccgtgggggctgcaggaggagggtcagagggagtcgcatcccagcccccacctgcacgaccccaccccaccagggcggcgtgtaggcccctgtgcgcaggacagggagtgtggcactggaggctggactcacacccgctgtcacgggagccagggcgagtctagcagtggggtccaggccatgtccccagcaccctcaagcctgggacacactcaacttgcaccaagctccaggaatctgcaaaataatgccaggtgtatgactcctgcgtaaggactgacctcaacagccgctcggttgtacactttcatcttactttcaagtcttaaagcttccgattcacactccagacattccatttcaataagcttcccaggatcctgcagatataaacagtttttgaaaagatggagatctgtaagggaagcagctgtgtacattcatgaaattcaaaggcatttaaaatattactgggtagaggtttaacaaatacaagtcacacgatgacacaaagacacctatgacgcagaggtttaagtgaggaagccgtgttttcagctacaccaactccttgtctgcctgcgggccccaccacctgagagcggcacgggagggtcctgagtttgcccttttcaggggccttgtcccggcccccaacacctggtacccaggcctcagccaggctgcttggcggcccggggctgcgctgaagtctgggaagcaatgtgttgtacgtcacaccgggaagaagggcactctacctctcctttcttgggggcttgctgagctcggggaagatgttcccaggcctcggtggccttacaaaagctggggagcaacgtgtggctgtcatccaaagaccactaaacccaccccgctcgaggggtgacacccctaaacccgccctggcgtgaggggtgcaggtcttctggacacaggagactcaagctcctagtctgtgagcgcaggcgctgatgatggtgaagcatcttcacaactatcagacacagacgtcccggggagcaggtcctcggcggcagacgcctccgtcccggggagcaggtcctcggcggcagacgcctccgtcccggggagcaggtcctcggcggcagacgcctccgtcccggggagcaggtcctcggcggcagacgtccacaagcacgggaagtacccgcagcacctcgggatggctgcaccgcagtcctgcatgtctgggcctcggtgccggccaggatggagagcgcaggaggccaccaccccaggctgtgtgccccggcctgtccagcggctgcaagcctccatgccactaaggaagccatgccaggcttcacagaggtcagaaaaagcgttccgtgcttcccacacgttcacggatcttaaaactctttatgtggtcccacaagtccaggtgtctgcctggttaaatcatttccaccattcactcaggcaattgtgaaatgtattacagtggatagtctttaaaaatgcaccaaggcttcaaaattaaaaactattcatatccttaacattagtgagcttttaatttaaaataaatctcgtgagatcctgaatgtctaacagtaggctggcggggataatgagcctcctggtagaatgtttacctagagaaggtcgctttcgaccagtggtcaggaggtaacaggagggctggggcctgagggatgggcagaggccaaccgggcaaagggccaggacagtgtcctcaagccggggcagaggaacatgctgtgcaggggccacgggcggtgggggcagagttgggccacaggagcctccctaacagcgaccccacgtcagcaggggcccacccgagagcctcaacctgggatacacaaaacattgctctcagttccacagcagcccttggagatgggtcctgttactgctgccattttgcagggacaagccctgaggcacagggagctgaaggaagggctgctgggaaggaggaagtggggccggacccaggcgttccatagtcattctgaattggggacaccgtgccgtgaaaacccagaagatggaaatggggcccacagaagccggtaaagggcatcaaacacaggagcctcccacgctgctcccatcctccgtgcggcatgggctgctgtttccagccttgaccacgcttcccacctgcaccctggtgggcggtccctccaagggctgcctggctgtcaaggccacgtgaactgcatctcctattctgaaaccatttccagatcagcacagccctcagcgtgactggacggctccccccgtgctgagccatggccgtgtctcctgcgccactgatggttggtttacgttcactcttaggtaacctgggcaaagcacacagcaagtgctcaatgaagacagcacacagggaggccccagcatgtggctgtgcatccgagggtcccccttcttcactctctgtgtgtaaagcgacactcagtttgctcaaaaccatccctgataaactgatcacattttccctgctctgtggaagagcctgtcacagttcctgaaagcatcggcaaacctgatgtatgcagtcttacacacttgtcgttgtgtgaagcttcttctggagggcaatactctaacgtgtattcttaaaatattaaaagtgaaaattccctagtcatttcatgtaaatatactcatcttagggaaaaatcctaaacgcagaaaaatgttttaggcacaaaatgttcactgcagccctttatgtaataagcaaaaaattatacggtagcccccccttctctgagaggatacgtttcaagaccccccaacccagtggaggcctgaaacgtggagtagtccgaaacccgattatactgtgatttttctagacggaaatccctacgataaacttcaatttctaaattaggcacaataagatatttataacaataactaataataagatacaatcataacactatactgtaacagaagtgatgtggctgtggcctctccctcagaatagcttaatattttcatactgtagctgtctgcaggtaacaaactgcagaaagtgaactgcgggtaacgaggcactgccggtgtgatttacacgtccaataatgggactggtggaggatgttctggatcatcagcatcatgaaattttacgccgtccgtaaattggactctagaaacaactgtggtgctgtggacccgtggccacaagaaaggtaaagagaaacgggcaggtgtaaaattgcaaacaccatctaactgcaactgtgcaaaacacaggtaggaaagacggcaatgtgccaaccacggaccgaagccctgggggccgtggcctggtgaactgctcttcctttctttgccttttgtccaactgcacggtgagcagcgcctcatccccaggcagcagtgtcatgaagccacttactttgctttccatcttcttcaggtctgagaggcaggcagaggagatctccatgcatttcaaggtcaaggaaaaacgcgccaattcaaaaagcaaaagcattctgcaaacaaacaaaccagccagcaccggctcaatagggggcacaggaaacatggctgcaggcgagaatccatgtcccccgttcaagcagaagcaggaaataaaggtaggataagaaataaataaaattaagttaattagaacagaagccctgtggggaggccccagcagggcttcaagctacagcaccggagcccagcagtctcccggggccagcacagttgtggaggctgcccagggccacgtccctactggacaccctgctcctcgctctccaggcttcaggtcatgtgcagaacccaggagaagcacagggatgacgacatgcgtactcaaagccattgcattgcacagcagctcagacccacatctgcagctcagcgaggccagaggccatgcagggaagaggcaggttcctcttcacacagagcccgaaccttcctcctccccacacagagcatgggactccccacactccccacacagagcccgaaccttcctcctccccacacagagcatgggactccccacactccccacacagagcctgggccttcctcctccccatacagagcctgggccttccctacactctccacacagagcctgagccttccttcttcccacacagagcctgggacttccccacactctccacacagagcctgggccttccccatactccccacacagagcctgggccttcctcctccccacacagagcctgggccttccccacactccgcacacagagcctgggccttcctcctccacaaacaaaacctgggcctccccacactccccacacagagcctgggcctccctcctctccacacagagcctgggcctccccacactccccacgcagagcctgggccttccccacactccccacgcagagcctggaccttcctcctcgccacacagagcctgggccttcctcctccccacacagagcctgggccttccccacactccccacacagagcctgggccttccccacactccccacgcagagcctgggccttccccacactcctcacacagagcctgggccttccccacactccccacgcagagcctgggccttccccacactcctcacacagagcctgggccttccccacacagaggctaggcctccccacacttctcacacagagcctgggcctccctacactccccacacagagcctgggccttcctcctccacaaacaaaacctgggcctccccacactccccacacagagcctgggcctccctcctctccacacagagcctgggcctccccacactccccacgcagagcctgggccttccccacactccccacgcagagcctggaccttcctcctcgccacacagagcctgggccttcctcctccccacacagagcctgggccttccccacactccccacacagagcctgggccttccccacactccccacgcagagcctgggccttccccacactccccacgcagagcctgggccttccccacactcctcacgcagagcctgggccttccccacactccccacgcagagcctgggctttcctcctccccacacagagcctgggccttcctcctccccaaaaagagcctgggcctccccacactctccactcagagactgggccttccccacattcctcacacagagcctgggccttcctcctctctacacagagcctgggcctccccaccctccccacacagaggctaggcctcccaatacttctcacacagagcctgggccttcctcctccccacacagagcctgggccttccccatacagaggctaggcctccccacacttttcacacagagcctgggcctccctacactccccacacagagcctgggccttcttcctccccacacagagcctgggcctccctcctctccacacagagcctgggcctccccacactccccacgcagagcctgggccttcctccttgccacacagagcctggaccttcctcctccccacacagagcctgggccttcctcttccccacacagagcctgggcctccttacactccccacacagagcctgggccttccccacattccccacatagagcctgggctttcctcctccccacgcagaggctgggccttcctcctccacacacagaggctgggccttccttgtcgccacacagagcctgggcctccccacactccccacacagaggctgggcctccccagacttctcacacaaagcctgggccttcctgctccccacacagagcctggaccttcatcctccccacacagagcctgggccttcctcctccccacacagagcctgggccttccccacacagaggctaggcctccccacacttctcacacagagcctaggcctcctcacacttctcacacagagcctgggtctccctacactccccacacagagcctgggccttcctcctccccacacagagcctgggcctccctcctctccacacagagcctgggcctccctcctctccacacagagcctgggcctccccacattccccacatagagcctgggctttcctcctccccacgcagaggctgggccttcctcctccacacacagaggctgggccttccttgtcgccacacagagcctgggcctccccacactcctcacacagagcctaggccttccacctcttcacacagaggctgaaccttcccaacactcctgacacagggcctgggtcttcccacgctccccatacagagcctgggccttcttcctccccacatagatcctgcagcttcctcctccccacacagagcctgggcttccccacgctccccacacagagcctgggccttcctaccatgcgacaagcccgtaggcgtgccgccaaccgcacctgcagtcaccaatcagggtctttgcagaaactgacaggctgaggctaaaatttgtatccacatgcaaggacccacagtgctccagacaacttcaagaaagagcacagcgggtgctctcagctctccactctaaggcttcctgttgagctgcagggatcaggatcacgctcctccggtggagattaggccagggtttccctccgggacgcctctcttccaggaggagcctgtccattgtgtccctgcagctgcccgctagatgaagagcagccgcccacagtgtctccagacattgccaaatgtccttggggagcaggtctacatgtcttctgctgtttcccggggagtaatcacagtcttaccgggaacacaattggcggctgctggcagcgactcaactcggccctcagtgtggtgtgaccatcctccctgcatccctgggtagctgtgggcaggaggctgctttggggtggggtgcggacgcttctccgcccctcgtccctgcccacctcctcctccccctgctctgctgttgggccctctcaggtcctggcaggcctggcatcacaacactggcctctccgtcctacctgagctccagcgcacaggcctgctgggcaggtcgggaagagagaatccgtaaaagtgcctgagaatgccgcctgtggacagacctcggaacagggctatttacactggtcccaagacctctcgtcggagcgcctggccacagaaggggatgctcggccagggccacggccacgcttggccggacttcagttagaacaacctggagggtctgatggaagacgtaaactccttccagaacaatatatccacacacatccccatgtacacatgcactcatacccctcccaaaaacagacccaccagcaggctggccctgtgcccctgcggcccaggctgtggcccagcagccaccctgcggtcctggggcccctccctcgaggagcctgcagctgagcagcggagacctcaatgttgggcaggtgccacctccctgatgagaccacgaacgtgctggcgtctggcgcccctcgctagcactgatgaagcaagctgtcccaccaggaccgaggcctgaacccacaggaaccgagtcctctcaacacccctgtgagcttgggggaccccttccccagtccagcctcgagaaaagaccccagaccagtcaacactgtggctgctgctgtgcccaggttcccgtcccacagacacagggaggtcatggatctgtgcccaggttcccatcccgcagacacagcgaggtcatggacctgtgcccgggtacctgaaccgcagacacggtgaggtcatggacctgtgttgtttcaagctcctaagtttgtgggtacttgttacgcagctgcagataactaatacaccttctctgttagtttcccatggccaccagaaaaccaaacagataatttcagcctcccatatcaacaagctttacttgtttcccattttcttaaaaatatacacagtgctactaaggaggtgacaaaatcgctccaggggcaggggacaaacccccccacccaccccgtgcccacgaaggcaaaaccagccagtgctttccatgtgcttctgaaagcctcgggctcagcttcctgcttccaggataccagcccaggacttatcccaaactctcaacagtgcctggaggattcgagaaagcacagaatccaaacaaaccagcctgaaaaaggctccagagaaacctgtgttttcccacccatggaacgccacgcagccaccagaaccgtgagaggtgccacagtgacctaaccatccatatgcctacaaactaaactcatgttaaaaagtagggtatgaaagtattcgcaagacagtacaaatctcaggccacaaaagaccagacaggaccttactaaaacctccacaatggctggcttttgcaaaggtggttctagttgcttgttttacattttttcacatttttcagtgcctgctaaattttgtacaacgattatgaagatgtgatattggaaaaatacaaacacttacttttcttcactgatagagggaaagcgctggtggttgtaatgacctaagtgtctgtaggccttcctcagaatgacactgatgtcacctggtaaatcattttgctccgcttttctagaaataattcagagagtaattcagcacaagatcctgtcagatttattcaaattcttctaagagaaactctgcgtgtatgaaattgtgtttctcactgaagaggagactgaaaataacccctcctgccttctttcctcaaattcctgagatgacttttcaccccttctggtcctccttccctccatgatgcccggccttcctacaaggctggaatagaaacactcagagggcccagacccctcgccagagtcagcaccccacataggagccaaacacgggaaatgtggggcactctctctgctcaacggcgataggacctgggccagcattgctctctcccagggatgctgcccataggacacaaatacctcagatctcctcactccccttggtatccaaacccactgtgatctcctcactcccctgagcacccaaacacactgcgatcttctcattcccctcagcacccaaacccactgtgatctcctcactccccttggcacccaaacacactgtgatctcctcactcccctcagcacccaaacacactgagatcttctcattcccctcagcacccaaacacactgcgatctcctcactcccctcagcacccaaacacaccgtgatctcctcactcccctcagcacccaaacacactgtgatctcctcactcccctcggcacccaaacacactgcgatcttctcattcccctcagcacccaaacccactgtgatctcctcgctcccctcggcacccaaacacactgtgatctcctcactcccctcagcacccaaacacactgagatctcctcactcccctcacatccaaacacactgtgatctcctcactcccctcggcacccaaacacactgtgatctcctcacagccctcagcacccaaacacactgtgatctcctcactcccctcacatccaaacacactgtgatctcctcactcccctcggcacccaaacacactgtgatctcctcacagccctcagcacccaaacccaccgtgatctcctcactcccctcatcatccaaacacactgtgatctcctcactcccctcggcacccaaacacactgcgatctcctcactcccctcacatccaaacacactgtgatctcctcactcccctcggcacccaaacacactgtgatctcctcactcccctcacatccaaacacactgtgatctcctcactcccctcggcatccaaacacactgtgatctcctcactcccctcggcacccaaacacactgtgatatcctcactccccccggcccccaaatacactgtgatctcctcactcccctcagcccccaaacacactgtgatctcctcactcccctcggcacccaaacccactgcgatctcctcactcccctcacatccaaacacactgtgatctcctcactcccctcggcacccaaacacactgcgatctcctcactcccctcacatccaaacacactgtgatctcctcactcccctcggcacccaaacacactgtgatctcctcactcccctcacatccaaacacactgtgatctcctcactcccctcggcatccaaacacactgtgatctcctcactcccctcggcacccaaacacactgtgatctcctcactcccctcggcccccaaatacactgtgatctcctcactcccctcagcccccaaatacactgtgatctcctcactcccctctgcccccaaatacactgtgatctcctcactccccttggcatccaaacacaccatgatctcctcactcccctcggcatccaaacacaccatgatctcctcctacaggctctttctgcacttggcttaaagccgccctctcccttctgtggcctcactggcctctcctctgtgctgggagggaggcagggccaggaattggggtggccttcggatccccacaccctgaggtctcccaggctcctattctccagccccactcactgcaactccagactcacaggcccctggacacaggacctccccccatggaggggacagagctctcccaagcccagcacttgtgaaactcagtatttgctctccctcccaaaacgacttacgcctttagcatattaatatagaaagtgactgacaggctaatggaatttttcttttcttcctttaactgaagttcgtccattaattcatgacgaacctgtcataaaatggagcagattattaatctggattcaaacaattcggtagaggttcagattttgtgtctagattttattttctcattaattttgtatctagcttttcagatacaacttaagctgattccccatatgtcaaaatggactgctgatgaatgaatgcttttggtacatattcttgtagtaattacttgtatctttgtgaattttctattaactttaaaaaaattcaaagctattacaaaggaaatatttaaagagcgacgataaaggcaaaagaccctgttttgttttctaaatgtcacagttctatacatctttgcattggatgaactgctatttctttttaatatgcttatgtaattttgttcatgtatgtatgcatatagatttttatatctctcagcaaacttatgtaatttctacgcagttttctgaacaatgacttttaagaaaattacttcttacgtctctatttctaatacgctgatttaccataacagagaatatctgccggtatttctgtggcacgtgagacttaatgaacggagctgccgtggagcagaacctggcagcctcctcctttcttccggcttgcagataacactccagaagttccctggataatagaaacacaccactggtcaacctggttgaaactgttttctcctatctaataaccaggttattaaaccattacatattttgtgtttcacaaagtttaaaagctaccctggggtcagcttcttcagccagaaccaggctgtgtggctcaccaggaagggccagcaggtgccagacagctcgttaccgctagcaccggggcattttgaaatgaaagatctgtattgatattcttcaaaggttccccaaacggccatatggcaagtaaccaacacctgcaggctgtgggcttggtgccgaggggagctgctctggagttggcacagctggaatcctcaatggggacatccacccgtccccagcctgcacagagagtgccgcagacacagagaggctcggacccgtttcctttccgccgcccggcacagtgaccgaagcattggtgacagcctgtgcggtgacccctcagggctgagacccagcaaggccggcctgccctgtgctgccccaacttcctcgcagggctgcctgggctccgcatgtgctgactctgcttagttttacgctgttaaaacgtctactgcgttaccattttaagaactaagattgtaaaaccgtgagccaggctgcgtggggcaggatcatatctgctttgctgggagtctaaacacagtatcttgttctgttgtcataacctcataaccagggcacggcaaatgtcatctacagattttggaaacgaccttcggacaagacacacagaaacttgtgactgtgggagagaacgcacatggagtgtgccccagtgatgtggaactcccgtcccccccccggagaaggggtggtggcctcagagccagagggcggcccaccgggaggccacagagggcacggcgagctcaactcacagcatcagctcagcacgccactccttgtcttcctcctcagtctgactcagcacgtttatgatttgggaaaggctggggatcagatggtgacgatatccaggcttgaggaacggcctcaccatctgccagtagaggactgatgcattgtacaccaaaaagtagtacctgcggcgcgagcagaggaagcagagagcacgctcaaagcccagccggcccaagctgcagaaccaaggggccgctgtgtctccggagcccctcccaggaggggcctcaggtcctctccagcagatggcagcagccccacctgagaagctttggcccagcctgcaggagcaccaggatgcagagcccttccctgggacagccttgggcgaccctgcgtccgacgtgccatggctccagcgcaggcccggctgtgatgacccggccacaggctcccgagtccagaccagggccttcttcatcaattattccacaaactgatcggccccctcccatgaaaatacaccactgggcaaggcctcctctgactctcaagggatagacaagaatgggcaaggacagagggaatcaaggaaggcttcctggaggaggttacatgcctgctgtgacctgaaagatgtcaggaggcagccaagacagtagtagaggaaaagaaggtcaggaagatggaggagaagggaggaacctttgggaaacaaagttcccgtctgccagcatagagtgtgaagtggaggagggtgggctggaagagtgagcagagacccctctcaggggtctgggcctctccctgggcagcagggagcattgcagggactgaagtaagggaatccgggcccatctgcccttctcactctagggccactccacagtggggcaggccagctctgccatgtagggcctgtgtgccttgtggtcctgggccggccaccaggtggaccagcactgctcaatgcccaggtgggaggaggacaccagggtggctgtggcaagcccactcctctgagtttactcagagccaccacgtgaccctaggacaggactcatcctgtttccaggttttcaggagaggagcggaggtgcggggtgtcctgaccagacggtcacgcctgcttgagtcagaggggtcatcatgggactccagcggcctgctgcgtctccctgagtgctgcgtctccctgagtgctgcgtctcgaaaggaacccgtctcctccctgtaagtggctctccccaaattcccactgtggcctccacatgcccgtggttgggctcacagtctcctgtcccactgacactgccctggacaagccagcgctgccctctctctccacacaacctggacccttcccaaagatggtcctgacctctggcaaggctctgtcaccccctgacccgtccacagtgcccctgagggccctggagcagagcagcctccttcccatggtacccaccactcccgcgtcacagcacccttggaaataccccttgtctttagaatctgtggcttgaggtggggcctccccgtccctgtccccatgcagagaggatctgtggggctgggccctacatccccagcacttgcaacagggtgtgaccagagaaggccaccagcagacaagcaggccgatgtgggtagaacagaccagggaacccacagcttctatttaaatatcctccaaacattgtatcctatttgaatatgtgatatatgttcaagcaaatatgcttgaaactgtcaagcttgcacaaaactgatttgaataggatatgaatcagttttgtgcaagcttaacagtttgaagcatgatatttgtttttgtgcagaaagcactgattttgtagaaagtgctggagtcgcctccgcagggacagcggccttggccaagttgtccgctagggagcagcaaaggcacgctgggccgaagaaggaaccgtggggaaggagaaggcgccctgggggtgcgcccggggaggccctggagaaaacagactctttttttttttttattgatacagagtctcgctgtcatccaggctggagtgcagtggcgtgatctgggctcactgcaacctccgcctcccgagttcaagtgattctcctgcctcagcctccccagcagttgggattacaggcatgtgccaccacgcccggcagaaaacagactcttcacagccatctaaaatcacgaaaaccgccgagtgcaaaagaggctgttactcggaattcggcatgaatgtggcctgtccacacgctgacgagatgagggagtgatcacacgtgcatgaaaatcacagaccacaaacgaggggaaaccccacagttcaaataaatacacccacttgataagttctggctctgaagtctttcacccagtcagtgagaaacggccacttcaattttgcctacctcggttctcctttggcaaagtttatggccttcatgtactcagtcacgcaattttcaaattcctcctaaggcaacataaagaagcacaattagaccgaaatactgacccctgctcactgccccatctgcggatgccacggctccctcacggttggcctggtaccccctgtgtgtcacctgtgtatccacaggtgacggtgtggcagacacagcctgagtgtcgtggcgaggtcctggacctgcacccgggttcccgtcccgcagacacagcgaggcagcagaaaccgcagtgcctgtgctccagcacgcccgccccaccccagctcccctgtgcccactcggggcagctgcaggcgcagatgccacagagaccacgctgctacgaggcaaaggtccaggggtcctgtgtgtcagatatcaccacttgagcaaaaagcatggacaggaaatggtgcaagtttcgtgtcactctggaaaggaattccttcactctactaccctaagaacgattttaagcctggtctagcctggcattgctctggagatggggtgaaaattgaactgttggggataaggggcacaggacgcctctcaccaggttttctgccgacttcggggcacacatctgggccctgcacaggtgcgctcggcccagaaactgggtgatgggcgccttcaccttgaagtacatttggatgcagtcctcgctcacctctggctgcctcatctgcaagagaacaccaccacagaagatcacagacccggaggggtggcctccctgcccagaagcaccacgggcccgctttcagaacaggcccccagcacaggtggagcctgtttccagccccatcctccatcctggccccttgactgcccggccaggagctgcctctccccagccccactctgcatccgctgcacacccagaggccctccctctccctgtcaaagctgccctgaccgaggatcccgggaactagttaccttcagggcctgctctgcacacagaacaaacaggtctgggctgaagctctctgaggggtcaaactccgatttccctaggttggccgatttgatcaactcgtaggccttcttcaaggacgcagcatctgtcccaaacgggtggttgaggaaggtttggtcactgggctgggagaagtgagccgggcaacgccatcccgaaggccccaggcagccgccttgggcccccgggccacagccaccgtcagaacctgtcgccgccagggagcagcggtgtgggcgccttcctgtacgtttgctctggtcagacgatcgggaggtgggggctccggctgtggccctcgagggatcacccattgggcgggctgggatgagagggtccggggcctccccggggcgggggtcgtggcgggtcccggggcctccccggggcgggggtcgtggcgggcctggggtcaccttgctggctctcggcgcgggccagctcctgcgtgatgaccaggtccatggcgccggcgccctgctcgtccgctctctccggggtccgcggtgcgtcctgccgcccactgtcggttgggttctccagccgcgaggacccggccacggttgcctggagaccgaaagggacgcggacgcggggctacgggtcggcggcggggccacacttcggggaaggcgaacaacgccgcgcccccgccctgccccccgccagctccgcgggagtgagacaccagggcagcgacccccggcgaggggcgggaagaagaaaggggagggaaggcggcgtggggggacgccgggggctccgcgcgggcctcctctccccgctcagggctcctgtgtgcccgggttctggtcctgaccccgggctcaccctccaccttccccgggaacttccgactgcgtccttcgcgcctgcgctcgtcggctcattcattcattcattcattcattcattcattcattcattcatccattcagtcagtcagtcagtcagtcagtcagtcattccttcattctttcgttctttcattcattccgtcattactttaacaggcggtgatttgcccctgccacggtgctggaagtgcagcgggcacagaaagtcgcgcagtggaaatgcgggctgcgggcgtggatggggccgccgggtctggggacgagctaagacctggcagcagggggtggccgaggcgggaggagcagacgcagagccccggcccccacggagagggtagcagcgcagccacctgccccccggggctccccacctcccagccggggctgctttccggccggggtccggacggcgcctacgaccgacccgaattggaggcttggcggggcgcgcagcccccgcgcggggaagccggagccactgaaggacttgggtcggcctggggaggggagggcccgggactcaccccggggtgggcacactaggggagctctaggggaggcccacctggggtaggcccacctgggagaggaccccctgggagaggcccacccacgagagtcccacgtgggagagtggaattccacccgggagaggcccacctgggagaggaccccctgagagaggaccgcctgggagaggcccacctgggagagtggaattccacccgggagaggcccacctgggagaggaccccctgagagaggaccgcctgggagaggcccacctgggagagtggaattccacccaggagaggcccacctgggagagaaccccctgagagaggaccgcctgggagaggcccacctgggagagtggaattccacccgggagaggccaccatacctacatgggatcaaataagctgcctggacatagttttgaaacctgaacgtcgtatgtttctcaggctcctagagccccaccccgtcttgaagttggcagcctcagatccctgctaaatgaccatattccttcccaaagacagttctcagatgggcctttgttggtaaagacactccacacatgggtacagcctcgataaaatatttatcccctcagagaaagtatatccaaacataatgtagtaagagatttcccaaatccaagggcattaaatattaaaactcagttttctagttacacattag

SEQ ID NO: 104 - DNA, 59534 bp, Homo sapiens
  source 1..59534: mol_type = genomic DNA
taaaagttgtgtgggaaaggaaaagtaatcatagtttggtacataacttggctgtgactaccgtttacatgattataatagcatatatactgaagattaatcaaacagaatataactatcttgggaagatggagagattaaaaaaaaaggttgggggtgaatatggggtgaaagtgatggagaaaaagagctgaagtctcctctggtgtctcagcactccacccaaggtagagcctctggatggaagaaggaatctcccacctctccaccacactcccccaggatttaccttcagcatcaggtagctaggggcaagatgagaaatgctgatatgctggtctctgactgggagctgtgggaagagagaggttctgagttgcagcagtctggagtggagtctcttgctgaacaaagggagaggtttggtttaaataccacagactgactctcacattctgatccaagagttttcatagattttttggaacagatgtttcttcatttgctgtttgcccttaggaccatttcaaaggctttaaatggttaatggttgtttgttgttttaaataattttcagtttcactaggggtgaatcccgagctcttcatgccgtcctgctgttagtctctcttggtattattcttcacctttcctgtgagtttaaaattatctcaagaaaagttaaagctctttaagaatcacaataaagtagttattaggaataaataaaaacgtagaggggcgcggtggctcacgcctgtgatcccagcactttgggaggccgaggcgggcaaggatcacttgaggccagcagttggagaccagccttgccaacatggtgaaaccccatctctactaaaaatacaaaaaaaaaaaaaaattagtcgggcatggtggcttgcacctgtggtccccgctacttgggaggctgagggctggatggtttgagagcgggaaatccaggctgcagtgagctgtgatggcgccactgccttctagcctgggcgacagcgcgagaccctgtctcaagaaggaaaacaaaaaaaaacaaacaaaaacatacacacaaaaaaccacaaagtgtgttcacgtttgctatgactcccagacaacaattgtaaacactcgcgccgggcgtggtggctcacgcctgtaatcccagcactttgggaggccgaggcgggcggatcacgaggtcaagagttcgagaccattctggccaacagtgaaaccccgtctctactaaacacaaaaattaggcgggcgtgctggcgcgtgcctgtagtcccagctactcgggaggctgaggcaagagaatcgcttgaactaggaaggcggaggttgcagtgagctgaaattgcgccactgcactccagcctgggccacagagcgagactctgtctcaaaaaagaaggaaagaaagaaagaaaaaaaaaaacactcgcagtgtttactcctaacgcgtggaacttgtgtcgacatccacccccggttactgcatactcagtcacacaagccatagcaggaaacagcgagcttgcagcctcaccgacgagtctcaactaaaagggactcccggagctaggggtggggactcggcctcacacagtgagtgccggctattggacttttgtccagtgacagctgagacaacaaggaccacgggaggaggtgtaggagagaagcgccgcgaacagcgatcgcccagcaccaagtccgcttccaggctttcggtttctttgcctccatcttgggtgcgccttcccggcgtctaggggagcgaaggctgaggtggcagcggcaggagagtccggccgcgacaggacggtacgtgccccgcgctcgacccccgcgctggcggcgccggagctgtcccagaccccaagccccgacgcccggccctgagtcagcattgcagcaggccctgcgccgccgcgccccgcgtcccaccccgcgccgctcctcacagccctgcgctccgggaaactgcaggtggccggcagtggccaggggatggcgggggcgcttctggaacctgactcagttttgtaggttccttatctcggttgtttaccgcgggctttgcggaatgcccccgcttccgtttccgcccggctccgaacccccgaaccccttctacccgcaactccgccccggattcccagaaaggggcgacctgggccacagcggtacaagctgcaccccgatggacctgagagaccggaagtaacccttggccaactctggccgccccctgcagccgcagccccagaggcccacccgcgagcttcagtggcgggccctcagcgtcgtgtaaactttgcttaaaatgatcttgagagttcaattcttggggtgaactgttgagaagatctggcatttttcctttcgaaagttgttgggaacgtggactttcccaacaattgtgtatgcgctcgatctcactcagtgggagccgccgccctggagggaatttcacaatagcctggtcagggcggttattttccagagcagtttaatgtctattttgcccaagtgcaaggaaagcttgccttgggaaagctgggaatgcttggctaatgaaaagtttttagagccttttaaaatgaacctgtttctgccacttttccaccgcctcaaaacgactgggaaatgtaaactggcttcaagatgttcttgcttgagggtgtctggatttggacagaaggccatgttcttttaatattaacagtggcacgcagtagaacaaaggccactgaaattcagaatcagtttttggctccacgggcaggaagtaaattcaaggacgccagaggtcttgcgaatattttaattggttgacatttgaaatttgttcttaagcaatgaggggtgaaaccagtagggggatagcgtatagcataagtaaagctttttggacatcaacaaactgcgataatctacaacagacagcgggctctggaaggtttgacctgctttagagagagatttccgataagaggaacggagtttttggcacttttcggtttggtgattcccctaaataaccttacaaaagtttcgttgaacaaaaaacctggctggagctccaagatcttttttttttttttttttttttgagacagcatttcactcttgttgcccaggctggaatgcaatggcactatctctgctcaccgcaacctccgcctgtcgggttcaagcgattctcgtgcctcagcctctcaagtagctgagattacaggcatgcaccaccatgcccggctagttttgtatttttaatagagacggggtttctccatgttggtcagtctggtctcgaactcctgaccttaggtgatccgcccgcctcggcatcccaaagtgctgggattacaggcgtgagccaccatgcccggcccaactccaagatctaaacaaaaaagactgggttgaaagggagtttttaatgtttactgtttgctttacatccattttcttgttttgttaatacttgctttacttaagcttttgggtcaaatgtcctcgttaaaatggctttctctagcgactttatgttttacgtttctgtttgtaactgacatttgaccttcttttaacacggtattacttgcttccttataccggtttccaaggtgaagccatttgcagggtcgctgggtttccccctccccccgaaagtcttgcgcgacccggggtgggccggatagtgtgcagttttttgagccttgggctggggacctccaggaagctgaagcggaaattgcctaggcccctggggcattggaggtcctaccgcagctcctagtaggtggtgggggcgcagcggctgtccccactcagtcctggtggggtcgcacgtaacggtcctgagctatgcataagccgtttgaccacgcatggagaattttaccacccagagacacgcgagtggccctgtgcaagtttcaactgcgcggggggcggggaattccgcagacaggattctagaatttatgtcttgtgtggtaacatttcagccggtgggtggcggggattaggcgtgaagcggttcagcaggcagaggttctcggacgccctccggcgaagccacctgttgatgcttttgactttctgtccttgttcctcgtcccatctggagcatttccaattctggttttgcggagcagcaggtctgagcttgtccggcgagggtgggagttggtcccggcggagatccagtgggaagagccggcggctgcccgggcgtgagtagaccgagaatcctgcccgatccccgcccctgggctggtgtcgccctgggctcctgggacgtcggggcactgtcccccgatactggcagaaaaggattgagtcctcgcttttggccctaggtctccttgagcctccagaggactcacaacactccggggcatgttgctctttcaaataccaggaatggactctggggaatggggcacccttgaagtctgattatttcttccctgtagagccccaggggctaattaaactcgtgtttatggactccaatgcctccttgcctttaattcagtataatcctaccaacatttattgagcttctctgggccaggcagagttctgggtgccgaggacatagaaatggatctaaacttggttcttgtccccataacctcacaatgtggttgaggaagactcagcagttacctacacaggtaacttcgagtcaaggcagtttagacaagatccactgacagcctgactggaggaagcctgtgggccatggtggggcagttatgacaccatgggttctttttgtttatttgtttgtttgttttgtcttttcttttagtatgcccaggtaacttgcagaacccggtcgttctttcttactatagatcagtgaggtgaaaagcactatcattattggaatgccctgtctctcccttatactctcttcctgtcatctcccctcagaagacttgacaccccaccctggtgccctttctctgtactttcatatgctcagcggctgtctttgcacttgcttcaggattgtacctaacattctgtactgtaatgcattttcttcagacactcttcagtcaagttgtattataattatgagttaaaatacatgcaaagtaaatagagaaaacctccaggggttcattccgtagagataaccaaaggtttcagtttaatgttttttttttttttttcacacatgtgcgctctcaaatacagtcttttacatatttttaaaaataaacactcaatttttttggtttattttctagtttgcaagatatttcattttttaaaattgtgtttatttacaacctgcttttttctaaaaaagattcaaggtggggccttcttttcttttctttttttttttttttttttgagatgaggtcttgcttgttgcccaggctggagtgcagtggtgatcatatctcacttcagcctctaactctaggctcaagcagtcatctcacatcagcctctggagtagctggaactacaggtgtgtgccaccacacccagctacatttttttttttttttgagacagagtctcactctgtcacccaggctggagtgcagtggtgctatctctgctcactgcagcctctgcctcctgggttcaagtgattctcctgtgaaaattgcttccttttctacacttgttctgtatttatgttcctctgatggtctccacttctagccactttctttttttggcgatttaagtttttggcccaaatagataaacatcttctacattatttttctcttattctcgatactgggttgccatctttggtgatttagtacttattatgaaagagagaagctacaccacttgataccactttcatctgcatactcatgataatttgtatcttctgcagtgaactcttaagttgaagaaatgaataatttatatgtatatttgtatacttttaaaaatgtaattgaaaaatcctctcatagttacttaactccaaggtttaaaaatgcttcccagggtaatgagtttctttagtcatgtgactttagaaatgggaaccaaagcttccttatctacttgtgaaattcttgagttttttccttgaacttcctttttatcttccctttggcttatatatctgtgttttttgtttgtttttacttgcagctttcaaaagtagttttcaaagtcaatgagattgtttaaaagagtaggtacctgacagtctcttgcttgaatactatctagtgagtgaaccaaattccctgcaacaataaccacaactttgaatcaagagttaaatgaaaaaagtaactccttcagcatttactgagcacctgctggggctgaggaatgggggcatgtagatctccctctgctgtctggagctccctttctggttggaaaacatagaagcagcgcaaaagtttcacccaaaaccttggccatggtatgctattgaaaccccatagttcagattttatacttgagttcttttctaagccatggctggattatgttaatctggcaaataattataaagctggattattttaatctggtaagtaattataaggttgtgctccgtgatgtagctattaataaaatatgtggtagcacagacaagttgtatatagcacaaagctatacccccagaggagacactatatcagttgctgtctgcctaggctttctgtaaacgtgctggctatcattcagcctaaatgtagaatgagtctatccctttaacctgggccatcaccaggaatgtaaaggaacctagaacgaggacccaggcaagagatgagaaactaggggacagatgagtaggtaccagggatggtgatgagactgaagcaagtggggaatttttattttcttctctacttttctctattttccagattttcttagagcaaaaagcaggtagtgctttttacagaaaatgaatgctatataaaagtaattttaagaactttatatatccctagtgttatgtacaatttctgactttgaatagagatatctcccaaagggccaagtttggccctttagttacaatggagaatctgttgtgtaaactgagcaaatacacctgccaagttgaaatttaatttaagccaatcttgtctagatgaacttaagagaacgtctcctaaatattttattgcagtagtgtagcatgattgatagtatgctattctcttgaatagatggggttgtttcttgagccactttttattcctttgatcaaaaccttgaggagaaggaatgcctgttttcctgactgctgttgcatgaagttagacatccagttcctctaaaggtgacatcagatggtttagatacctaaaaagaagtgaggctaagccataggtcttcttcgtactacctgaagttgagacctggtctctgaactcagttattgctgaagcattaaaatcttacatcttgcttaaactcaggcagcttgacctgttctcatttttctctatcaaataaattgaagcctggtaataaattgatgatgagttccaaacatccccttggttggagacattgtattctccccactcacaatgaggtcctgccagtttccagaaaattttgcatgggggcttacccatccttttagaatcacattgcaagtcactctaaagcattagcattgttatctcatgtagctgcaaaagcttcctttcacaagctcttctggatccaacaaccagattccaagtatggtatcttaactacaccaccagctccatcttgcttcattgtatgttatgaagggatgagtaagcgttacacatgggctgcaatggtccaatgatgaccagtctgttcaagacccaagagggctgagattggcagccctggccattgtttaccacagcctaatgaagatgagtaaaagcctatctatccccaaggacctccacatatgacagtactcaactgagtctcacataggatagaataagataaaatgctggaagagaacacaaatagtgctacaaagcaggaagagagacttgatttggggatcaagacaagcttatagaagagacatcttgagagagaagatataatttcaggtacagactgagaggagggaaggggctttccaaatggaggcaaatgcttgagtgaagttgctgggacagaaaaatactgtccagggaacattgagatatttttggttcggagttagattatgggttgggctgaagtggggatgatactcttagtgcttgagctatgtatcagaagtttgtctatagtattatgcacaatttctgattttgaacagagctatctcctgcaggaccactcttggcccgttagttacagtgggcaatccgttgtgtaagctgagcaagtatacctgccaaagtgaaaatttaaatttagttaagggcactacatcaactgatttagctcccttgctcctggtgactttgcccatgtttctatatccaattagatgatgatttatgatcttttgatttagatgctttctcatttctgattcattctcattttctgcagcctacacataagtgttaggaaccaaggaagttattggcgataatgtctggttggaatttgtgggagcttccttgagagtcatgaaaagtctgttcttagtctgttttgtgctgctataacaaaatacccacaaccaggtaatttataaaaaacaaatttatttctcacagtctggaggctgggaagtccaagatcaaggtgctgacatctggtgagggctgctccccgcttccaatctggtgccttgaacactgcattctacggaggggaggaatgctgtgtcttaacatggcaaaaggtggaagggcaaaaagagaaataaactccctttatcagccccctttataagggcatctaatcccattcaggagggaggcgcctccagggaatgatcacctcttaaaggccccacttcttaatcctatcatattggcaatacctgaactttggaggggacacattcaaaccatagcagcctcatcaaataattttataaaatatgacttctaattttatgtcattttataactgggatcatctgttgttctgcacgccaatggagggggaaggtgaattttgttatgttcaagatgaatgcacaaaacttctgtgagatggccacattctactttacccagaattgtgcaacctcttctgcttttagaaacttctggatgacactttgtttcatgttcatatctccactggggcttcccagacacctgaaagttcaggtttgcatgctgctttctgcagctggcaagacaggtttctccattgccgcccagtttgtggggttgcaagaaattacatttgcattcacgctgtggctcactggacatgacattgctttcatgccatacgatgaccttgcttcactagagaagcagtagaaagaagggaatgttaagtacgtctttggatggcttagctggtcatgctgcatgctttgctactgattacagggaacaatatgtgcctttgttaccagatagtttgggggcagcgttggtgttctgtgagaaaggttgagaggcctgactaaacttaaccacatttgctgacacctggttagggctaatgtgggtaccagggaagtgtgttaagtgcttcaatagaggtgttttgttttgttttgttttgtttttcgagacggagtttcactcttgttgcccaggctggagtgcagtggcgcaatcttagctcactggcaacctccacctcccaggctcaagagacttttgtgcctcaacccctcgagtagctgggattacagacatgcagcaccacggccagctagtttttgtatttttagtagagacagggttttgccatgttggccaggctggtcttgaactccttgcctcaagtgatccgcccgccttggcctcccaaagtgctgggattacaggtgtgagccaccgcgcctggccagttcaggcatgaactttagaaatttcacttagatggaaggtagatttggagagggtgaggtctaaagcagggggaacagaatggctaggggaatgagtttggatgagagacggatggtaggcaccagcatttaagggacaggtgcagaaagagtatgctgaggagtagaagaaagttagagaagggtctgtgtagaatatagtggtgtgagctcagccaagggagaagagtttcaaggagggatgaattagcagtgtcagctggagttgagcagtcagatgaaagaggacttccaagtttttggatgtggcaaccaggaggtcaccagggcctcaacaagagctgtgtcatcagggctgggatactagcaggggcaaacgaggcactggcttcaggacaacatgtgagggggtgctcaaaaagtcagtcatcaagatagataatattttaatgcaatattttaaaaaacagacataaatgcaaaaaatctatgatgaacaaaataccaacattttaaataaagacagcgtcagtattgctgattgtcccttttgcctcagattccagtatggctcaggactgagtgtggctgtgtagaggagatggtggtgaggggatccaggtggaggcatgttgagaagtgaattgtggttgaagaaactgaagcactgagtacagactattccttcatgaggtcccagctttatgtgaaagggaataaagtgaaaggatggtaggtctaggggaccctcaggcttttttgagggtttggctttattttttaagatggaagagacttgcacatgtttacaagctgggaggagccgtctctggaggtagagaggatgaagagagtagacataggggattagtagagacaggagggcacacagggaggcttagccctaggcaagcagagggacaggagggaccagctggggcagtggaaaggtggaaggtggcaggagtttgtgcctgatacatggatgagaaatggcactgggggtggtgttgggatggaagagagttgtggagtgttggaggtttcccacactccttgaagggtgtgggaaaggagctgaacagagtcttcctgtaaatgaaactgttgagcagccgtaggggcccagctcaggaaaccaccagggtgtggtggtgagtagttttcagattgtgttatctcttctcccttccttcggaacttgctactggaggtgtaggagtggtagaggcttcctcattaaggcaggggtgctggagcgatcaaccatccctgtttgcctgggactgaggggtttcctgggactcggtcaccctagatgttgcagggctggcagtcaggagggaaaaaggccagataattgaaaatgctggccagagtttgtagcatgcgctgtctgattgttgtacctgagcgagttagagaaaacgccacactttgagatgaattaagagtccgtttatttagccggcggccaagagacagctaacgctcaaagttctctcagcctcgaagaaggggctagattttcttttatactttggtttagaaaggggaggggggggtctagttaaaacaattttacagaagtaaagtaggcaaaaaagttaaaaggataaatggttacaggaaagtaaacagttccaggtgcaggggctttaagactattacaaggtgatagacgcggggctttgggcgttatcaatctgacgaattcctgagaactgcggatattgctggccacagtatcttatcagttaattgcattcttggatgtgctgggagtcagcttgcacaagttaagtccttgcggaagggctgccagtgaaacagccaagatggagtctgtctggctctcttagctaagggagagtcaattcaggtgaaaacaaggctaagtgattaaaggaaagggagagtctaaaaacagcgttagtaaaaacaaggttgggcattacatgatcactgggtctccactgtcagagggtctttgagctcagttctagtggcagcctcctgatcctcacttccctggctgaggcaaggttgttgcagcagccccaggagtctttgttagaatcccaccccagagctccttcctccagtcctctcagcagttttgttagttccagtattaagtgtaatttctacaaaaaatgcctggaatatttctgtttccagaaccggatgctcctgttagctagtgtgtgaaagataactctgacttgcctaagctttgttgatgttttgaataataattggcgatagtctcttgacttctgcaagagaaatgaaacagaaattggtctcaagttttagttgctcttgtgaaggtcagggacagtttgtaccagggtgtgggtgtggaaaagaaggggagatatagtcattaaattagaatatgcctgtgaggggagttaaggggaattcctttaaaattctagaaaacacacacaggtgccaattttgtctggctagggaaaagtaaactgctgaaaacacttggggggagaaatgaagctaatggtatcttgatcagtcaggaggattgggtatttgaaagcagggaagaaaaataattggacttggatattcctttgccccttcatctgagtaaggtgaaagcaagtgactcttcagaagaggcgaatgggacactgagtccagcagctcaggcagggtggagttggtaactgatgggcacaagtcttttactgggctctaaagaactcattcatctgggtgtggtggcttacacctgtaatctcagcatttcggaaggctgaggtaggagaatcacttgagcccaggagtttgagaccagcctgagaaacacagtgggaccctttccctacaaaaaactgaagaccttatgagcttccctagtctaagagtaatttttatgttaatttcttggcttgggcttaaaccccaacaaagtggtgattattcggaccccagccctacctctccctagtatgctctcctttctcaagtactcaccacctctagccacagtgaactgcctccagcatacacacacgctgctattttgttgcatctgagtgggctggctccacacgggatctgtagtttccttttgatattttctttcaatgtgccagatgctaccactgagtaatctagattttgctgccaaactctacccccgttagcacagagggaagacagtatgccagtgctcttgctgagtgtgcgtgactggcagaaagcagtcatgggtgtgatggttggaagaaacaaactgagcagataatgttttttaaaatgattatctcattttgttaactcttggtggcattgttatattgttgatacttatgaattacaaaagttagatgactgtaaaaaaatagagaattaagcatttcatttctagtagttctgtttggttctttttcaaatatgtcagtgaatttgtataatatctcatttcttagtcttgtgtttaatgattttatttttgtgtttttataattccttctactgcatatattttatactttaatttataataacaactgttgacaaaattgtgactattcattaatacagtagaaaagaacttggcctccttttcatggaagctgatgatgagattaaagcactgttggcctgcgagtggagtatagatttgggctgtccagaacacataaaatttgtatttatctttctgataaaaaaaagtaaaatagtctgagtgccaatttttccactttcattgagcacatttaattttagtaaatttaacttagcaaatttaatttctccagttatttacaaataatcatatttaagtgaagttgggatgaatgggcaagcccatttcaaatttctaacctaatttttcctcttgttttcatataaaatttttctatttatgtgtttttattttaagatagctcaaatcttttgtggactgatactgtatgtatataaataaatggattcagtgcttctttcactaaatacagctagataaatatataaatatacttgaacacaaatacaaagcaaccattggcaatttagagttgggttgtgtttccacttattttttgttaataaatttgattttaacctgaaatattgtcttgtaggaacagataaagaacacaagaggtgatttaacataagttttagctgtgaaacttagagtagataggttagcaacttaaattttgaaagaaaataggatgagtttcaatggaagaaattaagaacacacccattgcatgagctccttacccctcctacccagccccctcccaggagtgagatctttccccagatcctctgtaacttccagatgttccactgagaacatcagaagcactaatggcaattgctgccatgtagcagtgcattgagagtcagggcctctggcacctccatggggctcagggtctgaagacgtgatccaaacctgacaacttggtggcaggttctgtgagcattcatgatgttgtgaaaagggcttggggtctaggaggatggcagcagaggtttctgccctcaggtgtgagtgaggggcttttgaagtaggagagcaactagaaaaaaggagtggcacagggacagaaacttcttttctccattgtttgttcaaggccacgtgggtggagtcattgaggtggaggtttaactctgtgacataagtttccctgatttagtcaggctgtctgtcgttgggcttttcccacttccttctactacgtacttcttccctattcctcctactgaggccattaaacccttagttgtaattttccctgaacatgctttacattctgatgaattctgaaaaagaatgtggggtttccttgcagatgagttcatctgttgtttcatttcctttacaatgtaggttttcttctctgtctttttggattagtctgtttttggttctgtctaccaaggatccctttctttagacttctatagatccctttctatagaacttaatctacttaagtcagggagaccacccagaaggaaagagcccatactttcaatcttaggcataagttagcttgataagattttcagaaaaattcccttttaaccacagaactcccccactggaaaggattctgaaagaaatgaagtcagccctcagaaatgaagttgactgcctgctggctttctgttgactggcccggagctgtactgcaagacccttgtgagcttccctagtctaagagtaggatgtctgctgaagtcatccatcaggttgaagaagcacttgatacagatgagaaggagatgctgctctttttgtgccgggatgttgctatagatgtggttccacctaatgtcagggaccttctggatattttacgggaaagaggtaagctgtctgtcggggacttggctgaactgctctacagagtgaggcgatttgacctgctcaaacgtatcttgaagatggacagaaaagctgtggagacccacctgctcaggaaccctcaccttgtttcggactataggtaattcatcaactcttcctgaggctgggtgggtgggagggagtgaagtgtctcagactctactgaatggcagaaacgaggataataagaagtgcagccactttactgtctctgcccacttatccaactgccagatgatgtcacttcattcctgtgagccctttaaattcttgaaacttgttttcttgctttctttttctttctttcttttttttttttttttttttttttttgagacagagtctcaccctgttgcccaggctggagtgcagtggcgtgatcttggctcactgcaacctccgccttctgggttcaagcgattctcctgcctcagcctcccaagtacttgggactacaggcgtgcgccaccatgcctggctaatttttttttgtatttttagtggagacggggtttcaccatgttggccaggctggtcttgaactcctgacctcaagtgatccacctgccttggcttcccaaaatgctgggataacaggcatgagccattgcctccagctgaaacatgctttctcaaaggaattgggatcatatgcaggtagaagggcagctggtatgtgtttgcctgaaggatagaatgacaagacgtgaagaaagataggaatgactaagagctagtcattcttgccagcctctgacagtgtgagatctgcagcagtgtttactagttcattttctgtgaagtcagtccttgataatttgtggtacaaagaaaggaaataacaagtctgacagtaatcttcctacctttgtagagactccatcatcccttctgaatccctgttggccctaccctgctgaggaagtttatcagggtgggctcccttcctgcacttcctgcgcttggagacattggagagcccacattgaaaatctcttcagttaaccacatttaagtcccttcagtccaaagaggaaatggccactggagtctgctttagttcccacaagctttgggttgctccttcctcctgttcacatgttaatgtctttagaggttcagaggggcatggaagctactgagagactgacttcctggggaaaggaagataacttgtaaccttaagttggtgttttctttttttttttgagacaaagtctcgctctgcagcccaggctggagtgcagtggtgcgatcttggctcactgtaacctctgcttctgggttcaagtgattctcctgccttagcctcctgagtagctgggattacaggcacgcaccactatgtctggctaattattgtatttttactagaaacagggttttgccatgttggccaggctggtcttgaactcttagcctcaagtgatctgccctccttggcctcttaaagtgctgggattataggtgtgagccaccatgcccagccggtgttttttctctcgaccaccagccttttattatgttgataatgtgtatttggagatgataattattatcaagaactatactaaagagagctgaaagcagtgtgggctttggaaagtatatgagatttgaacttggaaagcctgtttttttggtttttgtttttttgtttgtttgtttgtttttgagacagggtcttgctctgtcatccaggctggagtgcagtggcatgatcatagctcattgtagctggaagacctgtttcaagcctcagatctaccaattatgggccaggcaggctgggccaatcactaaccttgttgggcctctgttttcctacttgtaaagcgaaaaataataatacctgactttacaaggttgttgtgagcatcagttgtaataatttactatgtgaagtactttttaaactgtgaagcactctacagatagaagggattattatcattgttattattattatttttttaatcttccacctattcagccatcagttttaatgtcagtaatcttcagactttccgggaggcaccaactgagtttcagtgaatagggcaatctctccatttcccatttccttgctatgatgagtggagattcttcaggccctctgggaagggttgcgggggcagttgaagaggagtgctagatttatttattcatctggtgagtgggcttcattgtgtattggtgctaagtgttttggtaagctctaggacaaaatgaaaagtctgccatcctcaagaatctgagagcctaactgggaaaatggccttgatgacaatgtcatggtaacaatactaaccacagggtgtccttaggagccccagaaaagtgtggttgttggttctcaaagtctatttcctagggggggaaaaatatatatatatatatatatatatagtgttagctccagccaccagtgagtcaggagaggctttctaggcaaagacatctaagttcagaatccttgtgatccagatgcctgtaccctttgagttcagaggtgggccagggtatctcaggtatttctttcctttagcatcttgcaattcaaaatatggtccttgaatcaacatcacctgagagcttgttaaacagagaaggctacttcaaattctatttctgtcttttatgttagtcatttgggttcttaagtcatttcactgtaacctctgggggagctaggggattctttaaggaagtttccattctctgagttgttttcagaaactgttagttggcaaaggatgtaccatctcctattaaacgggcaaggacaagttcccttttctgaggtcccttaagatctcttcctggggtgatctaggcttgctgttttatgagggagggacatatttacacaggggcaagaactagtcttttaatccattgttgcataggggaggcgtgggcacttggagttgtcttaggactgatgtctgaattaactaaatgaacttgtctggtttgcagagtgctgatggcagagattggtgaggatttggataaatctgatgtgtcctcattaattttcctcatgaaggattacatgggccgaggcaagataagcaaggagaaggtgagttttcttcttttggttcatggccccaggagcctatcagaagtgggagctactcttgttgatacagagagagggaagcaggcagtctgccgccactatagtgggagtcagacatctcaggtggcttttaaacaacatgaatgggaagagaattggtttatgaattgaagaaataggattataacatcttctggtgtggtcttggatgtttctttcatccttggattttatccttgtttctgtaaaattcataggtctggctcatatgtgtttccctccctggtttgatggggttgtggggaagacatcccatctgcttgtgctgggggaaaacaggaaggaggtgctagtccactatagtatcactctcctactgccatctatttctcctcagctgactcaaggtcattgtggggtctaggctgcatgtaggagtggggtggggggaggttcttgtgactggtgtatctgggaaatggtaaaagtagagatttagagttgaaaaccaggaggccgggcgcagtggctcatgcctgtaatcccagcactttggggggccaaggtgggtggatcacgaggtcaggagatcgagaccaacctggctaacacggtgaaaccctatctctactaaaaatacaaaaaaagtagccgggtgtggtggcgggcgcctgtagtcccagttactcgggaggctgaggcaagagaatggtgtgaagctgggaggcagagcttgcggtgagctgagatggcgccactgcactccagcctgggtgacagcaagactccatctcaaaaaaaaaaaaaaaaaaaaaaaatgaagaaaagaagaccaggtagtggtgaagatctcggggatgtcatgattgctagaaaaatatttaaaatccatggccaggcacggtggctcacgcctgtaatcctagcactttgggagactgaggtgggcagatcacctgaggtcaagagtttgagaccaacctggccaacctggtgaaactccgtctctactaaaaatacaaaaaattagccgggcgtggtggtaggcacctataatcccagctacaggaggtgaaggcaggagaatcacttgaacccaggaggcggaggttgcagtgagtcgagattgcaccattgcactccagcctgggcgacggagcaagactctgtctcaaaaaaaaaaattttttttaactccagttggcctagcacaatggctcatgggcacagtggctcatgcttgtaatcccagcactttgggaggctgagccgggcagatcacttgaggtcaggagttcaagaccagcctggccaacatggcaaaaccccatctctactaaaagtacaaaaattagctgggcgtagtggtgggcgcctgtaatcccagctacttgggaggctgaggcaggagaattgctagaacccaggaggcagaggttgcagtaagccaagattgtgctattgcactccagcctgggctatagagccagactccatctcaaaaattaaaataaaataaaataaaataaaataaaataaaataaaataaaaaaatataaaataaaataacattctagttggccctacatggtactgttgacctaaggataggccaggaaatgtttgagaacctattgtttctaaaatatgacaataggtcctcaaaataggcaggccagtgcctgcctgtaacgattcagataagtcattgcttgagaatttcctcatgttcctaatgattatagttttgtttcttaagtcccatcaaatgcaaaatgggaaggaaaatgaaactagaactccctttttggtttctcctagtaattgtctctcccagccatttatatatatctaaattatgattattattttcaaaaataaagatagcacttcagtaactaaatgttaaatgcaaaggaaatagatcccaaagcaatgcctgtttctgaaatatcgttcgttcataatcactgtggcccaaggtaaacgaatagcagaatactcaaaccttgttgtaatttcacttttttataatcccctgagtcagaacgtcagaatgagttggaaggcccaatattgattcaaatattttggaaactttaaaactataacatgtgatttttctcataaagtctttccccagctacctttcttctcctttttcagagaagcccttagagtttttcactatgacaccagcctggccttttggaaaataataaacttaggaggattgtcttttcagccctgctctttcacggtccttctcaatgacacaacatggcacacgtgtctctctgcaaccaaggagcagattgatgaccaaaagacttaccaccacctctgttctgagtaaaaatcaggagtctaagttgctcatgacagagatgtctggtttaagatcactgaaggtcactgaaagggctcatcttgtcacattttcttactgctataaatcacatggactgaggtttgcatttggggcttattagtcagctctattttttttttttgagacagggtctcgctctgctgcccaggctggagtgccgtggtgcaatcactgctcactgccttgacctctgagttcaagtgatcctccacctctgcctcctgagtagctgggaccacaggtgtgtgccaacacactcagcttattttttttattttttgtagagatgggggtctcactattttgctcaggctggtctcaaactcttgggctcaagcagtcttcctgcctcagcctcccaaagtgctgggattacaggtatgaacttctgcacctggcctagctagctctattgacatttgttttttgttggtggttctcttagagtttcttggaccttgtggttgagttggagaaactaaatctggttgccccagatcaactggatttattagaaaaatgcctaaagaacatccacagaatagacctgaagacaaaaatccagaagtacaagcagtctggtaagaattttggcctctcagtggtctaggggaagtactctgtgcatgggggtgggcatcatgactgataaatattcatttgttggataggtggatggaatggaacctggatgaccaaagcctcctttagcttgtggctagaaatcgcgtccctttatattcttcatatcccagatctgccaactccattgccctgtatattcatgatctctgcaaaatgctgccaagcagttcttaacatttcagtcttcaagaaagaatctgggatctgcacaggctggcagagctatggacattcaggggttttgcatgtatgctgaaccctactgccttgctctggtatttggcctcacaaccactgtccaacttcgggtgatgtcacttgggtctcataccttccttgcatgtgtcccaagtttcacaaaacctccttatggaaaagagcacattcgatttcttccttgataaaagggaccagattcacattggccttctgctttacttgcattcctcattgtcttttagactcagcctcagcttgggctttgttagcaagttcactgccaccatagcatcacagcctaaagggcatggctgagactcattgatctatagagcactcttttaccccaacatactctaaatgactgatcaaagatcaaaaacagaagagcatttatactccattcttgttttttgagacctgcttgatttattccgattatttaacacacagggacgcaacagtgatcccaaagtgtgtaaagttaaagccttcaactgcagctgaggagagggcaggaatggggacggtggtgagtcaggaatgacaggcaggcagccatgaccagggcagcctcctccccagggccagggactggggagtggcctaaggagcaggacctaagggtagcccagagctggggaagggggcagagacctccccttggcctaggtctggagctcagaagtgccacatgcctgagggggcagcggcctgggaagggccagaggcagggtcaggagagcaccatttcctggggggctggggacagggaggtgccctataggagaagccaggaggggccgtctgcccctgaggtgggggctgggctggagcaggctgcagcaagaaagacctgaggcaggcacagggcctgagagcccagctgcctgggttcaggggggctcccagggcagcctggcccagggagcagtcctgactctgcaggggatgcccagcaaggggggctgcagacccctcagagcctcccctcctctctccctggaaaggagctggggaacccatagtgcaaatctgtggaccactcagttatggagggaggctgtgcctgaaggtggacactggggtgcactccctccaccatctcgccctgcaccgctgtcctcagtacagccacttctcgtaagagtgcaggccatggatgccaccgtcgatctgggctgacatggtctgcttctcaaacttgagctcccctgagtacatcatggaccgaaggacagacaggctgtgggccccgatatcctggcagccatgctggatgcccactatgaggtagggcacgaacttctgaatggaccctttgtcctggatggagcccaagacatcctgcgtgatcttcgccttatccccgtcgttgaagtattgtttctggctgctgctgctcttctccatggcatccagtgagcccatgccctggtacttcttgagctgcattccgtctgagaagaagcactcgccgggggcctccatggtggcggccagcagggagcccatcatcactgtggaggctcctagggccagggccttgaccacatgccccatggtctggatgccaccatcggctatgatgggcacaccaaagttctgggtatgcttggccaccttgtacacagcagtgccctggggctgactgcaggctatcacttcctggttgatgtagatggagccgcgcagtccatgcccctgcccagcccatccacaccagcgtcaatcaggttgttggcctgggctgctgtcaccacgttccccccaatcacctggaggtggggttacttttgtttgatgtaatgcaccatggcgatctgatacaccgagttcccttgggacgagtccaagcctatgacattgacgcctacctgggtgagcaggtccaggtggtatttgtcatcctcatgggtacccacagctgccccgcccagcagctgctcatgggaatccttggaggccacagggtagtctcggttcttcagcgcggtgcaggtgataatggccaccagctcatcgcgatcattgacgataggcagcttcctttcttactaagctgcaggatctcatttgcctctttcaacctcacactgctggagccaccactagcttgatccttggcatcatcacctcactgaggagggtggtgtggtccttctcagcaagaaagtcgatgtctcgggaggtgacgatgcccaccagcttgctgcccatggtacccgtctcagtgatggggatgccagagaagccatgacgcatcttggcctccaacacatcacccacagtgtgcaaggggctcagcaccacggggtgtgtgataaagcccggttcaaacttcttgaccttctgcacctcactggcctggaactctggggtgcagttgtggtgaatgaaaccagtacctcccatcagagccatcacgatggccaggtcggcctctgtcacagtgtccatgggggaggagatcagcggcgtcttcagagtgaccattgggtcagggctgaggtcaggtccacctcatcagctatgaagtctatgaatcctgggagaatcaagaagtcgttgtaggtgagtccctggtcactggcgaagagctgctgcacggtgtggggaaaagaaagagagatcagattgttactgtgtctgtgtagaaagaagtagacataggagactccattttgttctgtactaagaaaaattcttctgcctcgagatgctgttaatctgtaaccttacccccaaccctgtgctccctgaaacatgtgctatgtcaactcagggttaagtggattaagggctgtgcaagatgtgctttgttaaacagatgcttgaaggcagcgtgctcgttaagagtcatcaccactccctaatctcaagtacccagggacacaaacactgcggaaggccgcagggacctctgcctaggaaagccaggtattgtccaaggtttctccccatgtgatagtctgaaatatggcctcatgggaagggaaagacctgaccgtcccccagcccgacacccataaagggtctgtgctgaggaggattagtaaaagaggaaggaacgcctgtttgcagttgagagaagaggaaggcatctgtctcctgccagtccctgggcaatggaatgtctcggtgtaaaacctgattgtatgttccatctgctgagataggggaaaaccgccttagggctggaggtgggacatgcgggcagcactactgctctttaagtcattgagatgtttatgtgtatgcatatctgaagcacagcacttaattctttaccttgttcttgatgcagagacctttgttcacgtgtttatctgctgaccttctctccactattattctatgaccctgccacacccccctctccgagaaacacctaaaaatgatcaataaatactaagggaactaagaggccggcgggatcctccgtatgctgaacgccggtcccctgggcccccttttttctttctctatactttgcgtctgtgtctttcttttccaagtctctcgttccacctaacgagaaaaacccacaggtgtggaggggcaacccaccccttcagcgcagtgaacccgtcctcgaccacgtagccggtgctgctgctgataggtagtccctcatgctgccgcgagaccccgcgacccgacataaacgctgcagctgctgcgacgcggaggcgcgccgctgccacgctgcagccaggcgccgggtgggctgggtgggctgggggcgggggctgcggcagcggcggggcgggccagggcgccctatactccattcttcatgatgtttggtcgaagagtcatctgaaattttgaattcagtaaggtggctagaaagtttagggtattttgaaagatggtgattgaccttggactgaaccactattgaagatttatttgataataatttgtaagttttaactcagtacctcccttctgcttttatagttcaaggagcagggacaagttacaggaatgttctccaagcagcaatccaaaagagtctcaaggatccttcaaataacttcagggtgagtctggagaaaacatatggaatcccagcatgaaaccgtttcagagttctaataaaaatatgcatattctcacagcatgtactttatttaatatctgaaaaaattgtgatagaaatgtgtatttgttttaaaaacgtgtaacttcttatatttcaaagctaatacatgttcattgagatatttggagactatagagaaagataaaagaaaataaatcacctatattccactatccaaagacaaccactgttagtattttggtatatttccttctagactcttttttatgtgggtttgcatctgtatctgtatgtatgtatatatatatatatatacatacatacatacatacagttggacaattggacatttttttcactgttcatttattcacttgaaattgtaacttaaaaaaagaaaatgtaactttaaaaataaaaatagatgcaccatgcctatggaaaaaaatttaaatgtactacaagaggttttaaaagtatttttttgcccgggtgcggtggctcatgcgtgtaatcccagcactttgggaggccgagccggaaggatcacctgaggtcaggagttcgagactggcctggccaacatggtgaaactccatctctactaaaaaatacaaaaattagccaggtatggtggcaggtgcctataatcccagctacttgggaggctgaggcaggagaatcatatgaacccaggaagtggaggttgcagtagccaaatcgcgccattgtactccagcctgggtgacaagagcaaaactctgtctcaaaaaaaatgttttcttcctacccctataatactgacctccaattatttttcctaaaggcagctgttgtgaactagttcattctgtaactatccagagatagtctacacatatatttcatttttgcttttttctcttctacagatgataacaccctatgcccattgtcctgatctgaaaattcttggaaattgttccatgtgattaacatggaactgcctctacttaatcattctgaatgattaaatcgtttcattttctaaatgtgttataatgtgtttagccctttcttgttgctgtatgtttagatgctttccaatcttttgttactactaataatgctataaaataaatatccttgtacttctttgtgcatttgtttttttactgagctaattttaatgatttcagcaaaagttattttgttattgagtgatgaaacaaaagatttttgagggtgttcatgagcataagtgtatcatatagtcacttatggttgttgtgttcctagtacttagtacaaggtatcggaattgttctttagttaatcttttatcttgagaagttaaatcttggtgtaatcttatcctcatgttcatataaagatatgtggagtttgtagtgaggacttagagccgggtacaatttcatggttaaattagaaatgcttttggcagtgttaacagctcttttagaatttgtctagcaggcttttcagtttttgccagaaagccctaaaaaaaaagaaggaaaaaaatgcttttggctgagtgtggtggctcacgcctgtaatcccagcactttgggaggccgaggcaagcggatcgcttgagcccaggagttcgagacaaacctggtcaatatgtcaaaaccccatttctacaaaaaatacaaaaattagctgggcatgatggtgtgcctttagtctcagctacttgggaggctgaggtgggagaaattgcttgagcctgggaggttgaggctgcagtgaggtgtgagtgtgccactgcactccagccctggtgacagagtgagaccttgtctctaaaagaaaaaaaaatattatatatatatatataaatgctttccttaaaatatgtaatgaaaacccactcttgtaatataaatggtttcttggagaatatgtctgtaagagacactactgagcaatgcaatttcagagctaaaatggatttacggattatattatccaactcccttaatgaacaaaataaggaaacttagccctaaagaacattaactgattgtctacttctaactactagcagagctgggcccagcccatactcctttcactgcactgtgatgtatataataaactatatacttgtcataccatatcttagagcatactttttgtttttttgagacagagtttcgttcttgttgcccaggctggagtgcaatggcgcgatcttggctcaccgcaacctccgcctcccgggttcaagcgattctcccacctcagcctcccaagtagctgggattacaggaatgtgccaccacgcccgggtaattttatatttttagtagagatggggtttctccatgttggtcaggctggtcttgaactcccgacctcaggtgatctgcccgcctcagcctcgcaaagtgctgagattacagacatgagccactgcacttggcctagcatatattttttaaaagaatgaaatgtgctttgttttgtccttctgagtctctgtaataccaaataatgagaaaaagcagatttaggattcagatccaggttttctgagctttctctgctattgtctgtctaatataaattatattgtcattcttagttaaaaaacctgccatatttttactattgtgtttctattttgtaaatgaagcatattcattgctatgtagcctgttgtgagcccatatgctttgcatattagtttctccttaaactttctatatttaatatgtgaccctaaggccgggtgcagtggctcacacctgtaatctcagcacgttgggaggccgaggcaggtggatcacctgaggtcgagagtttgagaccaacatggagaaaccctgtctctactaaaaatacaaaattttccaggtgtggtggtgcatgcctgtaatcccagctacttgcgaggctgaggcaggagaatcacttgaacctgagaggcggaggttgtcgtgagccgagattgtgccattgcactccagtttgggcaacaagagtggaactccgtctcaaaaaaagaaaaaaaaaagtgaccctgattattcattcattcatttagtaagcaggcactatggcatatgaatgcagtgactttcttaaaaggtttaggagccgaatacctagaagttaattcatatgaggctgcagaagtgcttcaaaaattactgtatgattaaatgccacaggataccacaagatattatagaattaaaaaattatggctgggcatggtggctcacacctgtaatcccagcactttgggaggccgaggcaggtggatcatgaggtcaggagttcaagaccagcctggccaagatggtgaaaccctgtctctactaaaactacaaaaattaaccaggcgcagtggcaggcgcctataatcccagctactctggaggccgaggcaggagaatcacttgaacccaggcggcagaggttgcaggcgccactgcaccccaccctgggtgacagagtgagactctgtctcaaaaaaaaaaaagaatttaaaaattatttggctacaatacaatgcttttaaaatccatctttgatttgatatgttacctctctctaataatatgtaaaagcgaatacacatgcatgcggccaatttctatctgatatgatcagcctctggctaagttactaattattagtgaaaaaggcaacttacatgtttttaatttagacacacagacttagctactgacacagcttaacagatagtgtatttcactcttttggctaggttagcttcagagaagaactgtcatttgaaagctgagtgtctcagatgggttgacagcatgtggtatgtgtatcttacataggacctgtcatctgagaagagaaagggtcggtttaatctttcattctctgattactcttactctagccctcagaagtggtttatcaagaatatttgattatcaagaatcaggaccatatgttgcttatgtgtagctaggcaatgatagaaaagcaataactggacatttattatgtacttccatgtgcttggcactgtgctgagtgctttgtgtgcatttaatcttcatacaaaatctgtaaggtatctattattatcctcatttagcatatgaagaaacacacatacagaagttaaataacttgctcgaggttacatagctaataagtggcagaattaggattcctagccaggtctgtctggcctagaaatccgactcttaaccatgctgtactttgcccctgtgttgaaggaacaggtggaatgtcaatctcatgttccaacagcttatcctaacctggagctatgctagcaactatactatactgtaacatcagattttattgggctgttttgaaacattctaatatgctagcttagcatatttttcttttctttttttttaatttttgtgacagagtttcacttttcactcttgtcgcccaggctggagtgcaatggcaccatctcagctcactgcaacctctgcctctcaggttcaagcaattctcctgcctcagcctcctgagaagctgggattacaggggcacgccaccatgcccagcaaatttttgtatttttagtagagatggggttttaccatgttggccaggccggtctggaactcctggcctcagatgatccacccaccttggcatcccaaggtgttgggattacaggtgtcagccatcgctcccggcctattttcatcttttaaaagcagaatttccctgttctttggtaatatgatacgggatttatggagttaacagctcttgctattctttagataatttaactgttgggacgatatttttatttttttcctgagttaagaatcctattgagacatttaaagaggtgtaatgtatagtgtacctctgaaataactaacaggaagtatgaccttattctttgtatttgaagctccataatgggagaagtaaagaacaaagacttaaggaacagcttggcgctcaacgtaagaccacctttttttaatattcattatttataaatgcttgataattctagtacaaatattgcatttttagagttggtcatttcctttatctacataatctaagtaagctctcaaaataaaaactggttaaactcttacgatagactcattggcatttctagttgtctattgaattagcttatctaagtttgaacaccatcgtactccatcagcttcatcatcttggccgtatgttaagagatgtgatgtttataactgaaatggaatggagctctaatcaggccatgttaaacattgatccaaccatgataatgaaccatgttaaaccaaatatctagcagcaggaagaggaatggtaaataagttcttgtcttacagcctatttaataaatctggatactctacagatgatatcccccctttcctaagaaagaaaacgtgcaatttaaagatgggtcatttcaacccgcatgagctgttttctctcttaaaacattagcacttgatcccatagatcattttttaaaagattactcttttttttttttggagacggggtctcactctgtcacccaggccggagtgcagtggtacacttttggctcactacagcctccacctcctgaattcaagtaattctcatgcctcagcctcctgagtagctgggattaaaggcacgcaccaccacacccagctaatttttttcttatcttttcttttcttttttttgagacagagtcttgctctgtcacccaggctggcgtgcagtggtgcaatctcggctcactgcaacctccgcctcctgggttcaggtgattcttatgcctcagcctcctgagtagctgggattacaggcttgtgccaccacacccagtttatttttgtatttttagtagagatggggtttcattctgttgcccaggctggtctcaaacttctgacctcaggtgatccacccacctcggtctcccaaagtgctgggattacagggatgagccatggcgcccagcctaatttttgtatttttagtacagataacgtttcatcatgttggtcaggctggtctcaaactgctgacctcaagtaatccaccaccttggcctcccaaagtgccgggattacaggcgtgagccactgcacccagcaaaagtttacttcttttgcttgtcttgagtcctccttgaagtgagagctgagactcagtcttacactgatgaggcacatggctgtggttccgaactccaggaaacggattgatgggctgtgatggagggcttcagtcttatccaagaggcttggaatctgtcctgtgtgtggtgggacatcatgaatgttttgagtagggcagtggcctaatagaagccctctttgtgtggcagtccccttacagatatcttacgactcagtctttgtgctatctgcacctggaaacttattttgcccggattagtcagctggtgtagctcatgtctgtcattctctacctaatattgtgctctccagcaaaaactactgagaagcgaattaattcctgaaatgatagcatgtttcttaaaacactggtgaggtgatgagaattagtattccgaagcctgtttaaagggaaaataggagacctagtagatttgcataggaattaaaaacaattggtgttctttccatttgctccctgatggcaattttatccttggtcataattgtacagatgaggtaagtgagaatccaaatatccctatgatcctgttaggagagctgcttacttgctcttgcttggacttggtttatttgctaataaaagaaaaaggtttctgggctgggcatggtagctcatgcctgtagtcccagcactttgggaggtcgaggtgggtgcatcacctgaggtcaggagttcaagaccaacctgggcaacatggtgaaaccccgtctctactaaaaatacaaaaattacctggtcatggtggtgcatgcctgtagtcccagatactcgggaggctgaggcaggagaattgcttgaacctgggaggtggaggttgcagtgagccgagatcttgccactgcattctagcctgggcaacagagcaagaccctgccccccaccccagaaaagctttctaataacttgggcttaatttaatagaagtttaaaatactcggccaggcatggtggctaacgcctgtaatcccagcactttgggaggccgagacaggcggatcacgaggtcaggagttggagaccagcctgaccaacacggtgaaaccctgtctctactgaaaatataaaaattagccaggtgtggtggcacacacctgtaatcccagctactcaggaggctgaggcaggagaatcgcttcaacctgggaggcggaggttgcagtgagctgagatcgtgccattgcactccagcctgggtgacagagcgagactccatctaaataaataaataaataataataatcaaaccaaatatttatattaatttggacttccaaatagatttgaactgttcagccatcattgaatttgatgaggatggtgataacttcaatttagtaatttcttgctaaatgccttaaactgagatagatatatcacatagattattttgtggcttttctttgtttgtttgtttgttctgttaatatataattgctaaaatacaaaaaatataaaatgaaatttcctctttcaagtatcagagatagctgctattaatgtttgatttttatgcctccagattcttttatatttaagcatatattaatacatgtgtaagtatatgtacacaaatatacatttttaagttcacagaatcaatattatacatatttttaataatccatttttcacttaatatatcctgtgtatctttttttaatttttttctttttttttggagacagagtctcgctctgttgcccactttggagtgcagtggcacaatctctgctcaaaactggttgttcttccacctccctgacctaatcaagtcatttttttctagcaaattagctttaggctcatctccatttgccaggctcactgcccccattgtcactgtcttgccattgacattttattttatgatctcccagtatcactggactatgaaaacagtgccatctgttttataactagcaaacacatataaactttccctgctctgcactctctaaggctgttccctttaggtattgtcaacagtttcagcacatataggaaagctatcagtattgttgggtggtgaggttattagattctcctatcaagttaaaaactcaccagccacctgttcctcacctagaacggggtaggggagagccttctttcacttgctgtttaagcagcttttccagatagcccctgatagcactgggacttgtgttttcttatgtcactttcttcagtgtgaggttgaaaccttggggccaagtatagctggggaaagaagagataattgaagaaaataggaagggagaacagttgttatacaaagaaactcagccagtgtaggggtggacttagctctccttcagctttgtaaatggtttctctctctcatcccccagaagaaccagtgaagaaatccattcaggaatcagaagcttttttgcctcaggtacagaataaatgatctgatttggtattatatgtacatagctgtggataaccctgacttctttaaaaatacctgtccattaagaattctttgagacagtgggactctgagagtgttgttctcctgagaacttccatacaagggaaccctgaataacaaagagaaagatgttaaagtggattgcattagtgaactttggaatgcagggaagttccaaagtagcactcctcatctcaactcagtgactgctgaacatattagtcagcagtgatacttccctgaactttggcttgttctggctttttcttaggttgacacctctttgtaagcagaagcaatagaagggctccctttgtacttgggaacatgccacttatataacttcaggttactgtggagacaaatcactcatgttttctctctttttcaaattatctttattccacaaagccaataaagagagtgggattttcattaaaattaaataaaaatgaaaataatttgtcttaagcacattaccctaatagaggaaaaatttgatattaatgggaaacatttgccgtaatgggaaacttcaggctgtgtctgttgagtgactcacctgccaaaggaaatccaaaagaagagatggtatatgggtgggaccttatagaaacagagcaatatccagagtctttagcatttcttgtcttcctttccagagcatacctgaagagagatacaagatgaagagcaagcccctaggaatctgcctgataatcgattgcattggcaatgagacaggtaggtgtggaagctgcagattaactggtgcccccagattgagatcatggcacaggcaagctgtattcattggagtgatcagcaccaactgccgtgacaaaccagttcaagaatctgtgcttcatcctgggtgcggtggctcatgcctggaattccagcactttgtgaggctgagatgggaggatcacttgagcccagttaaaaattagctggtgtgggctcgggcacggtggcttacacctgtaatcccagcactttgggaggcggaggcgggcggatcatgaggtcaggagttcaagaccagcctggccaatatggtgaaaccccgtctctactaaaaatacaaaaattagctgggcatggtggtgggttcctgtagtcccagctacttgggaggctgaggcagaagaattgcttgaacctgggaggcagagcttgcagtgagccgagatcgcaccaccgcactgtagcctgggtgacagagcaagattctgtctcaaaaaaaaaaaaaattagctggtgtggtggtgcacacctgtagtcccagctacatggtaggctgaagcaggaggatcacttgagcccaaggaggtcaaggctgcagtgagccaagatggtggcattgcactccagtgtgggtgacagagcaagaccctgtctcaaaaaaagaaaaaaaaaatgaatatgtgttacaacacaatagagacttgtttctcattcatgtcacaggctagtgtggatcgggctgggggagctttgttcatgtggctattcagtggctccattatcttctgaggtcttggagttttctacagagtcccttgcatctggctagcagataagggaagagagaatgtgtgaaggatctcacaagagattttagggaccaggcctaaaagtgataatgtgcatcatttccaccccattagattggtcagaactcagtcatgtggctccatctaactgtagtggacatggagaaattagtctcgctgtgtgtcaggaggaaatgaaatggatttgggggacacataacagtgtctctggcacaaagacatcatttacggtagttggtgagccttagtcttgccttttcttttggatgctgaagcagggaggagtcctggaacccagaggggcattaatattaatggaaggcattctggcttcacatattatcacatgccccatcatttcacctagatagacgacaaaagctttcctgggaacattaaagacataataaatgtgtgttcacttacagagctttggatattttctgagctgtgtcagtcagttctgctgtcctttgctttggtcgttggcctcagtctcttctatctgcgcgtcaccattgcttggatctgagatgattcttttgctcagttgttgttggatgtctgactcaaactgaatcactggtgctgcatcaaaagagaatgagaagagcctagataagtggaatgacattctgtttaattatttagctcttccttaagaggatcgatcattgtatttccagttttagagcttctcaacattctcttaaaatgagtcagaactatctttcaggctcacttaaaatgttaccatggggagttttatgggaagaaaggctaagagaaggtcaaattagcaaatataatactaaattttccaggatttcagatacgatcctgcttggtcgtgtcctatttttggttagatgtgagaaagataagtgtcttcttttcagccattagtacccatataagaatgagaaaatattttcttaatgagtcacttcctgttttaagagattatgtaattgtcctgtacttctggttttggtcagttttgtttcattcatcagtagatgttgtacgtatatctgttgtatgagagaatcataaaaaaaaaaaagccatgacctgctgtgaattgaaaaactaagttttttggctaaaactcaatgtctgtgcttgcttctgttgctgggttatgggcctcttgggggcgggggctgaatgtatatttgaatttttctgcattataggagcatgatcagagttgagaaatggaatatgacagtgtgggtttgaatcatggctatgccatgttctagcttgtgaccttgggcaatgtccctggcctctttattttttttaatgtttttttttttctttcttgagagagaatctcactcttgttgcccatgctggagggccatggtgcgatcttggctcactgcaacctcttcctcctgggttcaagcaattctcctgcctcagcctcccgagtacatccctgccgggaatacaggcgcccgccaccatgcctggctaattttttgtatttttagtagagacggggtttcaccatgttggccaggctggtctcgaacttgctgacctcaagtgatccacccacctcggcctcccaaagtgctgggattacaggcatgagccaccacgctcggcttctaattttttttaatttaaattttatttttatttttcctgtagtgctgagttctcggccttcttaagtcccagtttctcttctgtaaagtgggttaataacaggacctacctcatagggaggttgggcagaatgagagttcatacttggaaagggcttagaataatgcctggcacagtgtgagcatgtactagatgccaactagcattatttcctcatttgcttgttcaattctagccataaaccacctaagcaagagctcaccatggctttgcacttggtacatagagtctgatctcagacaagtgagagaccagggcactgaggcctgccctaggcccaagggtgagtggaatgcatccccatagactgaggcgcactggaatggaggccataacttgagagggttatccaacttcttggataaacactcaagtggaaagctgagcacagcactcctaccagtcacagtctgaatgggcttggcagaggagaatctaagtacaaagtacaggagggcagagacctgataaaagagaaagatggaagaagatggtagaattggaggcagagcctggggcatcatgcttttggccacaggtatgagcaggtattggtcttgactgcactggtacatctgtttcctgccccatggttgcggatgtatctgtatacgagctccaagaatcagaatggcagctctagacagcaggtccttcctggtcagacatagtcctttaaagttcaacatcttggtggtacattgctggacaagagtaggcctgggccattagagggtaccctggatgctcggtgctgcctttcccctgagaatcagggtgatttgactcaagccttctctgcctctgggaacaaaatcagtaattgggcttgaggccacttataaacccccctgggctcaggtggctaattagcaagtaagaaacaaggcagcacacttttactcttcttgtgctatggttttcatcagctgagaggtcacaaatccacttacatgcagactcagagcagcaggagaacattaattattaagaagtggaaaggcacagtctcctctcctcacaccatctccctaggcctccagctcttcatttccctcctcctctcctggtaatttgtcactgaagattctaggcccagaatcctgccttggttgaaaatggttgttattattagtgcagcacccttcatctcttttccttctaatccgcagttagggggcttcatctagagtaattatgtggatttcctctgtctggttaactttgccatctggttaacattgaacacttgggaggagtgcaggagtcagataatgaacaagcgggtaaggtaattgccagccgaaataaggtctctgaaagaaagaaacaagaacatgataggactaacctaggcatagctgtgctcagagtatataatttattaaaaatctactacgtgccaggtactttgctaattgctttacacggattcttgcttaatcctcatgaataataccataatataggtactattctctccattaaattttttttgttctacttagaactaatttgctaggaatattctattttcttttctttcttttttttttttttttttttttgacagagtcttgctctgtcgccaggctggagtgcagtggtgcaatcttggctcactgcaacctctccctcccaagttcaagcgattcttctgcctcagcctcctgagtagctgggattacaggcatgcgccaccacgcccagctaatttttcttttttctttttatatttttaatttatttttaagacggagtttcccttttgttgcccaggttggagtgcaatggcgcaatctcagctcaccgcaatctccacctcccaggttcaagcgattctcctgcctcagcctcctgagtaactgggattacaggcatgtgccaccatgcccagctaattttgtatttttagtagagacaaggtttcaccatgtcggccaggctggtctcgatctcctgaccttgtgatctgcccacctcagcctcccaaagtgctacgattacaggcgtcagccatcatgcctggcttattctctccattttcaaggtgaggaagctgagcagtgaactacactcctaccttctctagtactgattgagctgggattcaaaagctggactccaaaacctatgcttttaactactttgcctcaatataatttccatgaaggtgagggagtttatctatctcctactatgggtctccagtacctggaagaatacctgctatgtaggtgttcaataaataattgttgggtgaatgaatgaaggaataagctctcccagtgtcagtgtgtttctaaaagccattcctttttatctttagagtttagcagactctcttctacctatcttcccttctctcctcaaaaaaccagacttttatccaaaaagcatgcaagtcccccaagtatttaaagctttatttctttgtttgtccagtaaatgttcgttgagggcctactatgtgcaaagcaccatgcttggccctgtgtgaagcaaatattaaggcaatgaggtggagtctgatctcagagctgtgttgtgcatgaaataaggttattctttggtagttctttcttgagaagaattcttatggagttcagtaacctcttcttgaggcagaagtaaatgctcagggatttgggaactaattatctcagtttggtagaattgaaaaataagtctttggtgttgtgtcatctgtgtcagtgacagcaaagctggacctgtgctaggccctggtgggtcatctttaagcactggacttttatcttgttaggaatatagaagcaagcgtctcacatctctgacagatgggctttacggcttggcctaaagctctggttgtttttaaggcccttgaataaaaataaaagacgatgtttgcagattttaagaggaagttttttttttttttgagacagagtctcgctctgtcacccaggctactggagtgcaatggcgttatcttggctcactgcaacctctgtctcccgggttcaagcgattctccgcctcagcctcctgagtagctgggattacaggcacccgccatcatgcccggctaatttttgtatttttgtagagatggggtttcaccatgttggccaggctagtcttgaactcctgacctcaggtgatccgcccgcctcggcctcccaaagtgctgggatcacggggatgagccatcgcacctggccaagaggaagtattttttttttctatcctgctctttctgaaaagcttgaacatttttctgtactttccttttcttttttgagacagggtcttgctctatcacccagaatggagcacaggggtacaatcatggctcactgcagccttcacctcccgggctcaagcaatcctctcacctcaccctcccaagtagctggaactacacacaggcgccaccacatccatctaatttttaaaatattctgtagagacagggtctcactatgttgcccaggctggtctcaaacttctgggctgaagcaatcctcccacttcagcctcctgagtggctgggactacaggcacatgctatcatgtctggctaactttgttttttatagagacagggtcttttgctgtatttcccagggcggtcttgaactcctggcttcaagtgatcttcctgccttggcctcccaaagcactgggattatggccatgagccaccacgtaatctttgttttatgcgtatttataagctttgcttccccaacaagattataagctctttgattgaagtacatcatatatttgatatgtattctcttgtccaagtgtttctgtaggcaataaggggaactttgtaaaacaagagttttccggtcaagtaaatttgagaagcgctgcctaatctcttccccctcagagatttgcaatgcatattgacctattaaaggctctgagaattcttcctgcgaagaaacctattttagccttgtccaccttgcatttcccaaacacgtttgacctcagaactccctttttcactaagaatgttttgcccatcttatgttttacccatgtgctctatagcagttaacactgggcttattaaaggtactcaatatgtgattgtaaattaactggtgaagcattccctcattcttgtttattttatacatttatttaatgaagcccttttcatagaaattgtcaagataaatgtatcctcatttagatcaaaacaaattctaaattaatgaagtcatgacattttactgtattttggtttttttggtttatctgtgaagtcctcaaacctgtgagtagtgctgaccctagccttgaatgaacagccctgtactaactgcaaggccagaagaacccctgcccttcccctccccacccccccacatcatttccagaagttctaaagaacagttgaaatttacggagatcagactgggttgagtgtgggatttccagggtgggttctagaaggagaagtgggtcttctgtagtttgttgaaattttattttccaaacccagcccccaagtttttcttcctctatttatgtgcaaggacaaaacagttactgtcctacctacataggatatggactctgtctgctctgagcccattttagtttagaatatagagacctccctccaggtcctaagagagagattccatgagagatgtgcaacaccataaggttggtgatttgtactttgaaatggctgcctttatttcctttaaagtcaatatcttatatttgaataaacacagtttgcaaagcatctttacagaaatctcattggatcctcacggtcaccttttttctgagacagagtctcactctttcacccaggctggagtgcagtggagcgatcttggctcctccacttcctgggctcgagtgatcctccttccttagcctcccaagtagctgggaccacagatgcgtgccaccatgcccagccaatttttgtatttttggtagagatggggtttcgccatgttgcccaggctggtctcaaactctgcagctcaagcaatccacccgccttggcctcccaaagtgctgggattacaggtatgagccactgtaccctgccctcacagtcaccttttgaagaacctcctgctcaagagatcctcctgcctcagcctcctgagtagctgtgatgactacaggcttgtactaccatgcctggctagtttttttattttttgtagagacggggttccctgtgatgcccagggtggtctcaaactcctgagctcaagccatcctcccacctcagcctcccaaagtgctgggattgtaggtgtgagccactgcacctggccaagcattagttttaatcttgttttatagatgaataaactggggctgactcaaactgactcaaagtcacactgtcattacctttttgatcctgtacgttagactgggctgtatgcatgttcttgctggcgcaataaagttgcaagtgccagctaacagcccttcccactccacctcaccacctcatagaggaaaattgtgacgttaatgggaaatgtcagcggtaatgtcttcaggctgggcctgtggagtgactcccttgccacaggatatttaagcaatgctgtgtcttgtctgaggctcagacctgctattcttattggcacttgggacctgcatggtttttggcttcacctccagctttagccatttttcttctgttcttttaggtaaggattttctgccccagacctcagattcccatttccttcctagcttctctgctgttatagctcagtctcttccaagaccatgcaagattcagaccctagtaggaggagatggaggaactaggacttaaacccacatcttgtgattccaaggctggttcctcttttgccctgcaccacacagctgtctgctcacagtcatgtgacaggggcttccccagccagaacctccagggagcacaaataaaggaaagagctggaaggcacagtacagcatttgttctgtccaagccttacatatcagcatgggcagggagaatgtggtgaagttttctttcaaggactttgtttgataaggaaggacatttatcagtgaagagaggttttgagggaagtgaaccaatcttgagataagtacacaaaagagctttgagtctggtgtttccctgtttgcttctgccccctggaggagcaaatactccatgattagagacgtgtgagtcctttggaatagaatagcagtgatggaactggagtcctagtccaggttctctccttgttcagcctggattcagcactgggtatcgaaacaagcctgcaccctcagaggagatggctaggggacagtgcgtccaggcctcttctaccacacagagttttcttttttttataaagggtatacacatttaaaatttaatgatactcccaaattgctcttcaaaaaggctgtgcaaaattacagtcctgataacagctacccagagatcctgtaacggcatttgccctcatcattattattattattattattattattattattatttgaatttgagacggagttctgctctgttgcccaggctggagtgcagtggcgcaatcttggctcactgcaacctctgcctcccgggttcaagcaattctcctgtctcagcctccctagtagctgggattacaggtgagcaccaccacgcctggctaatttttgtatttttagtagagacggggtttcaccatattggccagactggtctcgaactcctgacctcaggtgatctgcccgtctcggcctcccaaagtgctaggattacagatgtgagccactggggctggttgccctcactatttaatgggttatttgcaacctgtgaatcatgtctcctatttccttgttaatgatgcttattgattatagacttaggaatatcagcacctcctttgtagctcttcattcttacatgatataataattaatttttttttttgagacagagtctcactctgttgcccaggctggagtgcagtgtcacaatgttggctcactgcaacctccacctcctgggttcaagcgattctcctgcctcagcctcctgagtagctgggactacaggtgcgtgccactacacctgactaatttttgtatttttagtagagacagggtttcgccatgttggctaggctggtcttgaactcctgacctcaggtaatctgcccgcctcagcctcccaaagtgctgggattacaggtgagccactgcgcccagccaataattcattgtttaatccttagttgtgggccaagcaaaggagaaaagtaagaagccttttccttttaccgataggaaaggtcaaaggacttacctggtgaattatttacctaaaaatgtatacaaatcactccaaaatttagtggctaaaaacaacagtactaatttaattatatcttcacagttactaatttaattatatcctcacctgtgggtgaggaatttaggagcagcttagctgggctgttctggcccagagtctagtgaagttgtggtcagttgtcagctgggtcatctgaatgcttgattgggattggaggctccacttctatggtggtcactcacatgactgagaagttggtgctagctgttggcaggaagcctgttcttcatgtgggcctctctgagggactgcttgagtactttcatgatgtggtggtgggcttctcccagagtgagccactcagaagagagaaagattgtgaggtctggacttcaataagaagattgttgaagaaaaaaaggttttgtccccccttggtttgattggactagagtgggctcagtctgtgcctgtggctggcatcaggcaggaacagtggtatagcagggtatagaccatatttagggacctaaaatcacatctttcatgattcatgtggttcttgttccaactgcccaggactcaggcacatcaaaatatgacacaaaagcagaagcttttcataatggagattagaccatgtctaggattcctacccagtcctcttgagctctcctcactccagtgttgttttccgtgtttgttttttgttttccccagagcttcttcgagacaccttcacttccctgggctatgaagtccagaaattcttgcatctcagtatgcatggtatatcccagattcttggccaatttgcctgtatgcccgagcaccgagactacgacagctttgtgtgtgtcctggtgagccgaggaggctcccagagtgtgtatggtgtggatcagactcactcagggctccccctgcatcacatcaggaggatgttcatgggagattcatgcccttatctagcagggaagccaaagatgttttttattcagaactatgtggtgtcagagggccagctggaggacagcagcctcttggaggtggatgggccagcgatgaagaatgtggaattcaaggctcagaagcgagggctgtgcacagttcaccgagaagctgacttcttctggagcctgtgtactgcggacatgtccctgctggagcagtctcacagctcaccatccctgtacctgcagtgcctctcccagaaactgagacaagaaaggtgagcccccaggaggtggtcagttccggaccacctgcttattttcgtgccaccaggatgggaattaccactgtgccacatttgctgcccatctcttccgggaggaaaagagattttccctcctgcattgggcttgccctaggactacagtatagacccggcatgatttataaatactttgtagttagttagtttgtagtttgaatacttttctttaaaattaagaaattttcagcctgggcaacaaagtgagaacttgctctataaacatttttaaaattagttgggtgtggtggtgtgcgcttatagtcccaactgcttgggaggctaaggtaggaggattgcttgagcccaggagtttgaggctgcagtgagtcgtgattgcactactgcactgcagcctgagcaacagagggagaccttgtctccaataaacaaataaataaatacaaataacaaatttatttatttttatttatttttttttttgagatggagtcttgctctgttgcccaggctggagtgcattggcgcaatcttggctcactgcaacctccacctcccaggttcaagcagttgtcctgcctcaccctcccaagtagctgggattacaggcatgtgccaccacgccctggctaatttttgtatttttagtagagactgggtttcaccatgttgaccaggccagtcttgaactcctgacctcaggtgatctgcctgcctcagcctcccaaagtgctaggattacaagcgtgagccactgcgcctggccacaaatttttatttttaatttttctttttttttttttttttttttttttgagacagagtttcactcttgttgcccaggctggagtacagtggcatgatcttggctcgctgcaacctccgcctgctgggttccagtgattctcctgcctcagcttcccgagtagctgggattacaggcgtccgccatcacacctggctaatttttgtatttttagtggagacagggtttccaccatgttggccaggctggtctgcaactcctggcctcaagtgatccacgtacctcggcctgccaaagtgctgggattacaggcatgagccaccatgctcagccaccttccagatctttttttatttgatacccacacagtcatgtagaagtatatcttttttgtttgtttgttttttgagatgacatctcactctgttgtccaggctggagtgcagtggcacacctcggcttactgcaacatccacctcccgggttcaggcaattctcctgcctcagtctcctgagtagctgggactacaggcgcacaccactacggctttgctaatttttgtatttttagtagagatggggtttcaccatgttggccaggctggtcccgaactcctgacctcaagtgatcctcctgccttggcctcccaaaagtgagccactgcgcccagcctggaagtatgtttgtaagcccagatggaatcatcatctattgtttcttttttttaattaaaaaaattttaatacagttcaaatccccatgtctggctcatttcagctcctttactgccaaagcaggggacaaggactgcttcagtttctctgccttctctttctctgaaggtatctgctgcattgaacttgaaagttcacattatccttatttttcttgatcttgacagatttggcatcctttcacctggctgtgagcagaaagtccttgatttcctcaattttgcaaggcatggcgatgaggcacacagggagaggacaaggacaggcacccctctatcccatgtatcacccaaaagacactcacagcctgccatcactttataacctgcttttagtttgtttaacagtagatcacaaacatttttgcatgtcagtagtcacatttctacagcatcagtttaatgtatgcacaatagcccataatatggccatagcttaatttacttgatcaatcttcagttgttgcacagtgtttgctttcatacgaagtaagtattaaacatccttgtaacttagtatttgttcttatccttaattgttttctagggggacaattcccggaagtggaattacagagtcaaaggacatgcatttttcaagcctcggatgcatcttactagatgtcctataggatggtcatatcagctttataggagagtagctgtgtccctgaattctccctgacactgcatgctcttatatttcctcaagttttgacaatttgataggtgaaaagtggtatctgactgttcagatctggaaggctttgttatataaacatttttttaatgtttattggcaagaatacttttctaagagaaacatcagtgagctggtttccatttaagctgaatgaagccacaatgtacctcaagtataagattaactggcctttttcagttgcactctaattacaatttagaatgatgtttctgagccacctgtcaaatgcattctgggctgtacctctgcgtaccccaggaataaatctcatggccttctttacctggcctccttagtggtggcccagcaggaagcgggggttagagcaggagccactcagccttccaagatagatactccatgggccggtggtattactggccttttgagcccatccccatttgcatagatgatccacgtgggttatcatctggctggtatgttcccagagtgaaactcagcagccccttgagggaggggatggtggccatcaggccagagtattgcaagttagtttggatcatttgctaagcagcttgtggtgccttcagaaaggaacagtttcaaagaactttcacatctgttggctcatttcgccctaatgacagtcttctctttgatatttgcatggcattaaattttgcctttcttgttttctccagaaaacgcccactcctggatcttcacattgaactcaatggctacatgtatgattggaacagcagagtttctgccaaggagaaatattatgtctggctgcagcacactctgagaaagaaacttatcctctcctacacataagaaaccaaaaggctgggcgtagtggctcacacctgtaatcccagcactttgggaggccaaggagggcagatcacttcaggtcaggagttcgagaccagcctggccaacatggtaaacgctgtccctagtaaaaatacaaaaattagctgggtgtgggtgtgggtacctgtattcccagttacttgggaggctgaggtgggaggatcttttgaacccaggagttcagggtcatagcatgctgtgattgtgcctacgaatagccactgcataccaacctgggcaatatagcaagatcccatctctttaaaaaaaaaaaaaaaggacaggaactatcttactcaatgtattagtcatgtttctctagagggacagaactaataggatacatgtatataaaaaggggagtttattaaggagtattgactcacatgatcacagggttaggtcccacaataggtcatctgcaagcaaggaagccaattcaagtcccaaagctgaagaacttggagtccaatgtttgagggcaggaagcattcagcatgagagaaagatggaggccagaagactacaccagtctagtctttccatgttttgcctgcttttattctggcagtgctggcagctgattagatggtgcccacccagattgaggatggtctgcctttcccagtccactgactcaaatgttaaatctcctttggcagcaccctcacagatgtacccgggaacactttgcatccttctattcaatcaagttgatactcagtattaaccatcacagtccatttgggcaactataccaaattaccatagaccaggtgacttaaacagcagttatttctcacagttccggaggctgggaaatccaacatctaagtggtagcatatctggtgtctggtaaggcatgcttccagatcttaccagatgtcagtcttttgatgttctcacatggcagaaaaagaggatgcaaactctcaagtatatctttaagggcacaaattccattcatgagggctctaccctcatcacctaattacctcccaaaggccccaccttctgatactgtcactttggggatactgtctcccctttgaattctggggggaatacaaacattcagtttgtaacaatagccttatgatttagaggttacttgttcattcacctagacctcaaattgcattttacagctagtcaagtatatctttctctgatttgatagtgtgacctaaaaggggaccattgtttgaaatatcattagagttgcttattattattattattattattattattattattattattattattgagacagagtttcattctgctgcccaggctggagtgcagtggcatcatcttggctcattgcaacctctgccttctgggttcaagcgattctcctgcctcagcctcccgagtagctgggattacaggctcctgccaccacacccggctaatttttgtatttttagtggagacagggtttccaccatgttggccagcgtggtcttgaactcctgacctcaggtgattcaccagcctcggcctcccaaagtgctgggattacaggtgtgagccactgcacctggcctattattatttttaaattttttttttttaattgatcattcttgggtgtttctcacagagggtgatttggcagggtcacaggacaatagtggagggaaggtcagcagataaacaagtgaacaaaggtctctggttttcctaggcagaggaccctgcggccttccgcagtgtttgtgtccctgggtacttgagattagggagtggtgatgactcttaaggagcatgctgccttcaagcatctgtttaacaaagcacatcttgcactgcccttaatccatttaaccctgagtggacacagcacatgtttcagagagcacagggttgggggtaaggtcatagatcaacagcatcctaaggcagaagaatttttcttagtacagaacaaaatgaagtctcccatgtctacttctttctacacagacacagcaacaatctgatttctctatcttttccccacctttcccccttttctattccacaaaaccgccatcgtcatcatggcctgttctcaatgagctgttgggtacacctcccagacggggtggcggctgggcagaggggctcctcacttcccagatggggcggccaggcggacgcgccccccacctccctcccggacgggatagctggccgggcgggggctgaccccccacctccctccccgacggggcggctggccgggcgggggctgacccccacgcctccctcccggacggggcggctgccaggcggaggggctcctcacttctcagacggggtggctgctgggcggagacgctcctcacttcccagacagggtggctgtcgggcggaggggctcctcacttctcagacggggcagctgcgggcggaggggctcctcacttctcagacggggtggccgggcagagaagctcctcacatcccagacgggggggcggggcagaggcgctccccacatctcagacgatgggcggccgggcagagacgctcctcacttcatcccagacggggtggcggccgggcagaagctgtaatctcggcaccctggggggccaaggcaggcggctgggaggcggaggccgtagccagctgagatcacaccactgcactccagcctgggcaacattgagcactgagtggacgagactctgcccgcaatcccggcacctcgggaggccgaggctggcagatcactcgcagtcaggagctggagaccagcccggccaacacagtgaaaccctgtctccaccaaaaaaatacgaaaaccagtcaggcgtggcggcgcccgcaatggcaggcacgcggcaggccgaggcgggagaatcaggcagggaggctgcagtgagccgagatggcagcagtacagtccagcttcggctcggcatcagagggagaccgtggggagagggagaagagagggagggggagagggctatttttaaaattttttaaaattgctgaacaggggtacctctgggcagtgtgtcagaataccactttttaaatattttatgatttatttatttttctatttcttgaggttttaactgatgtgtatctgtatgtctatttgtgtatattttgtcatgatcatgtaacagagtctgaaaagtgtcgaagagacagttttcaggaacaacaagcaattattcctactttccaagttattttgatgccatggtggctcatacctataatctgagtactttgggaggctgaggtggactgatcacttgagcccaggagtttgagaccagcctgggcaacatagcaagactccatctctacaaaaaaagacaaaatttagctgagcgtggtggcgtgttcctgtagtcccagctacttgggaggctgaagtgagtggatcccctgagcccagagaggtcaaggttgtgatgagctgtgatcacaccactgcacttcagcatgggagacagagtgagaccctgtttcagaaaaaataaataaataaaaccaccagcaccacaaacaacaacaaaaagttattttgtacttgttttgagcacaggactcctgagggtatctttgcatttaatattacataggggtgccagtgggaagtaatgtgtatgcttggcctcatgagctaaaaccctgtgttaattatgacagaaggaaagtgtgtgagagagatcttaactacctagcagctctagctgccatcttgaaccatgaagatacgggccacacgtaggggtagctgggtagtgagcagcaagaagccttgttggatgagggcacgaaggagcagaatcactggaatcactgtgtcagccctaattacctacctctggacttttatgtgaggggaaaaaaaattgacagtttatatttatctcaacctagttaacccaagtgatgcattgttatgagattaaaatgtttggaggccgggtgcggtggctcacgcctataatcccagccctttgggaggccaaggcgggcggatcacgaggtcaggagatcaagaccatcctggctaacatgtaaaaccccgtctctactaaaaatacaaaaaattagccaggcgttgtggcggtcgcctgtagtccctgctatttgggaggccgaggcaagagaacggcatgaacctgggaggtggagcttgcagcgagctgagatcttgccactgcactccagcctgggcgacagtgcgagactctgtctcaaaaataaataaataaataaataataaataaaatgtttggaatgttggcttcatccctgggatgcaaggctggttcaacatacgcaaatcaagaaacataattcatcacataaacagaactaaagacaaaaaccacatgattatctcaatagatacagaaaaggccttcaataaaattcaacgttgcttcatgttaaaaactctcaataaactaggtattgatggaaaatatctcaaaataataaccatttatgacaaacccacagccattatcatactgaatgggcaaaagctggaagcattccccttgaaaactggcacaagacagggatgccgtctcaccactcctatttaacatagtattggaagttctggccaagaaaatcaggcaagagaaacaaataaggggtattcaaataggaaaagaggaagtaaaactgtgtttgcagatgacatgatactatatctagaaaaccccattatctccacccaaaagttccttaagctgataagcaacttcagcaaagtctcaggatacaaaatcaatgtgcagaaatcacaagcattctatacaccaacaatacacaagcagagagccaaatcatgaatgaactcccattcacagttgctagaaagagaataaaatacctaggaatacagctaataagatgtgaaggatctcttcaaggagaactacaaaccactgctcaaggaaataagagaggacacaaatgaaaaaacattccattctcgtggataggaagaatcaatatcatgaaaatggccatactacccaaagtaatttataggttcattgctattcccattaaactactattgacattcttcacagaattagaaaaaaactactttaaaattcaaatggaaccaaaaaagagcccgtataaccaagacaacaataagcaaaaagaacaaagctggaagcatcacactacccaacttcaaagtatactgcaaggctacagtagccaaaatggcatggtactggtacaaaaacagacacatagaccaatggaacagaatagagaccagagaaagaagaccacacatctacagccatctgatcatcgacaaacctgacaaaaacaagcaatggggaaaagattccctatttaataaatggtgctgggaaaactggctagccatatgcagaaaattgaaactgaccccttccttacaccttatacaaaaattaactcaagattaaagacttaatgtaaaacctaaaactataaaaaccctagaagaaaatctatttaataccattcaagacataggcacaagcaaaggtttcatgacaaaaacatcaaaagcaattgcaacaaaagcaaaaattacaaatgggatctaattaaactaaagagctcctgcacagcaaaagaaactatcattagagtgaacaggcaacctacagaatgggagaacatttttgcaatctatccatctgacaaaggtctaatatccagaacctacaaggaacttaaaacaaatttacaaggaaaaaaacaaccccatcaaaaagtggacaaaggacatgaacagacacttctcaaaagaagacatttatgtggccaacaaacatataaaaaaaagctcaaccttactgatcattagagaaatgcaaaggagaaccacaatgagataccatctcatgccggtcagaatggtgattattaaaaagtcaaaaaacaacagatgctggcgaggctgtggagaagtaggaacacttttacattgttggtgggaatgtaaattagttcaaccgttgtggaagtgtgtgtggctattcctcaaagatctagaactagaaatactatttgtcccagcaatcccattactgggtatatacccaaaggaatataaaccattttattataaagatacatgcacatttttgttcattgcagcactcttcacaatagcaaagacacaatagcaaatgcccatcaaagatagactggataaagaaaatgtggtacatatacaccatggaatactgtgcagtgcagccattacagcttttggtgatacagtgaatcagatttttcattaattcttttaattggttattactgaacgtgaaaaagtaatgtttgtattgaaatcttgagtctggccatgtttctattttaaattcataaagaattctaacaagaggaattccaagaatgtcataaatggatgtttctccatggatgaaggaactgttttattcacttgctgataattcagcctaatccagtttgacatcatatagataagtagttgaattatggatttaaaatacatatcattttctaactccaaaggtaatacttatttaaatggttttgaaaatatagaaaggcacaatttctttttaaatctgttattctccaccaccactcaatctgtctatcatctatctctccattcattcttccatttgtttatatctgttaatctttgtatgtgttcatgtatagcttttacatgattggaatcataatgcatattccattttgaagtctgcttttttttacacaaaaatatgttgtgaatattttcctatattatgaaatatcattagctgagcttttagaattgactgcatgttttggtaccatttagatatagtttaagatacttagaagttatgtggctttgccactatggatgaatcttatttactcaatattaattacttacaaataacctcacctaaacactactcagccataaaaaggaatgaattaatgacattcacagcaacctggagactattactctaaaggaagtaactgaggaatggaaaaccaaacattgtatgttctcactcataagtgggagataagctatgaggatgcaaaggcataagaaggatacaatggactttggggacttaggggaaagggtgggaggggggtgaaggataaaagaatacaaattgggttcagtgtatactgctcaggtgatgggtgcaccagaatctcacaagtaaccacttaattacttacgcatgtaaccagataccacctgttccccaaacacctatggaaataattttgtttttttttttaaaaaaggaatgagatcatgtcctttgcagggacatggatgaagctggaagccattatcctcagcaaactaacagaggagcaggaaaccaaacaccacatgttctcacttgtaagcggaagctgaacaatgagaacacacggacacagggatgagatcaacacacactggggcctgatgcaggggccgtagcggggagagcatcaggataactagctaatgcatgtggggcttaatacctaggtgataggttgataggtgcagcaaaccaccatgggacacgtttacctatgtaacaaacccgcacatcctgcacttgtatccagaacttaaaatattttaaaaatctttagagaatacaaaaaaaaaaaaaaagattcttcaatgcatacacaataaaattgcagttcagtcaaacattggaagtctttctctgactgtctagttggtatcttcattttcagcttcttcaagatcccactccaaacactgttagctcagccaaattgaacagctcatatctcctacctctggatctttggttctggtgattgtatatttctggaccatctggaaccccagcatatcaccctaccccacatctccacatccccaaaatataaccatacttcaagggcagttcaaataccatctccttctatcctccatgaagtcagttatctcttccattggaattatcgccccctctcctgaacagtactatttcgtgtgaatctcctccaagccttcttttcattttatatctcatgctgtaattcttggaaagtatgctgtagctcaagtgcagaattctcatcagttttatctttatatctctcctaaacactttacctgatgaagagcctggcatacacataaatatatattgaatgaatcagtgatggattgaaaagagaaatgatggatctcctaaattttaacttttataaaatattttgatacattcatgaccttactttagcaagcaatgaacgtgatgtaaactattgttgatatagtttttatattggaagtgtaagtagtttgtggcatgggattgtgacatatcctaggtttcctcatcttctttttattgaaatgtaattcacaagccataaaatttgcccctttaaagtaaatgatgcagtggattttagtatatttacagagttgtgcaatcatcaccactatctaattccagaacatttccatctacctagaaactccataccagtgagctgccactctaatcctcctcttcccccagcctctagaaacaataatccattttctgtctctatgatttgcctgttctagatattttataaaaataaacatgtggcctttcgtgtctgacttccttcacttagcatgtttcaaggttcatctatgctatagagtgtaccagtgcttcattacattttatggctgaataataccctattgtgtggatataccgcatttagtttattcatcagttgatcgaaatttagactgtttccacttttttgctattatggatgatgctgctatgaatattcgtatatgaatttttatatggatatatgttttcagttcttctgggcatataccttagaagtgagagtgctcatcatatagtaactctatgtttagccttttgaggaactgccaaactgcttttcaaagtagtagcatcattttatattcccaccagcagtgtatgaggttttttttatttttttgtttttgagacggagtctcactctgtcgcccagggtggagtgcagtggcgttatcttgattcactgtaacctctgccttctgggttcaagccattctcctgcctcagcctccctagtagttgggagtagctgggtttacaggagctcgccaccatgcccaactaatttttgtattgttttttgagacggagtctcgctctgtggcccaggctggagtgcagtggtgcaatctcagctcactgcaagctccgcctcctgggttcatgccattctcctgcctcagcctcccaagtatctgggactacagccgccctccaccacgcccggctaattttttgtatttttagtagagacagggtttcaccgtgttagccaggatggtctctatctcctgacctcgtgatccgcctgccttggcctcccaaagtgctgggattacaggcgtgagccaccgcgcccagccaatttttgtatttttagtaaagacagggtttcaccatgttggccaggctggtctcgaactcctggcctcaggtgatctgactgccttggcttcccaaagtgctggcattacagacattagctactgtgcctggcctcaagtcctttctcattttaaaactgcgttattttattttatttttctgagatggaatctcactctgtcgcccaggttggagtgcagtggtgcaatctcggctcactgcaacctccacctcctgagttcaagcgactctcctgcctcggcctccctagtaactgggattacaggcacccaccatcacgcctggctaatttttgtatttttagtagagacagggtttcgccatgttggccaggctggtcttgaactcctgaactcaggtgatctgcctgcctcggcctcccaaaatgctaggattacaggcgtgagccaccacacccggtgggttgtctttttattgttgagttgtaagcattctttttaatattctggatactagtttcttatcaggtacaatctttgtgaatatattctcccattccatggattgtcttctcactttctggatactatacagtacaagttttaaattttgatgaagttcacttgatttctgttttttatgttattgcttatgcttttggtgtcatacctaaaaaac

SEQ ID NO: 105 - DNA, 50701 bp, Homo sapiens
  source 1..50701: mol_type = genomic DNA
gggcctagagggcgggaccagcaggccctgccgtgacacgcatgacatccctccctgcagccgtgctacgagacggtgaaggtgtggcttcaggagaacctgctggctgtgggcatctttgggctgtgcacggcgctggtgcaggtatggcctgggggcctgcgggctccctgcccccactttgttaggaccttctgagcccagggaacaaagtagcaaagaccttgcccccaggaacccacgatcgggggaggccggggcaaaagcaggagggcgagttcagggggatgggcagggacggcctgtggggacagtgggctccctcttagtggacagaggcagaggctggtgtggggtggaggccggtggtcgtccatgttggtcggtggcccaggactggccagtgcacagagggtggcagctggggccctggtgccagtggcccctggtttccaaactccacagccctcaggaagttctgggtgtcctcatgcctgcaaggctcaggggagggtgctgtggctcgagccacaggggttgggtggggcgtgcaagccaccaggaagctgaagggctctgccactgtgtcgcccaccctggggtcggggtcagggccagggcacctgctgaggacagggactgctctgggcttgaggcctgagcctgtggagctgccatgcccagtcctcctcccctacctacagatcctgggcctgaccttcgccatgaccatgtactgccaagtggtcaaggcagacacctactgcgcgtaggccgcccaccgcccgcttctctgccaaaaggacgcccacggggagatggccgcacccacagctgcctttcccaccaccagcctcggtgctctgccccatgctgggaggagggagggagggacaggtgcctggagcccccggaaccctgtttctggaaggccctagctcaggtggcttcagggcctccggaccccccctgggaggggtggccacgtgctggctgcggaacccagggcaggggtgggaggggcctccagcactttttatatttacgtattctccaaagcagtgttcacacgggagccagcctgtggcccccagcctcctggaaaacaggttggcgctggaggagccgggtcttggcatcctggaggtggccccactggtcctggtgctccaggcggggccgtggacccctcacctacattccatagtgggcccgtggggctcctggtgcatcttaataaagtgtgagcagcaaccttgcgtctattgctcgtctgccttccctaccctatcttcccttctggcacccaggcctggggcagggcagcctctggcatgaacggtgcttaggcagagccctggggctgtggggtcacctggtgcacaggcttgggggagctgcctgcagagcagtctccagacctctggttttaaggaaatcatgacattagctctaagaagtgatgaggccgggtgcagtgactcacacctgtaatcccttcggctttgggaggccaaagtgggtggataacctgaggtcaggagtttgagaccagcctggccaacatggtgaaaccctgtctctactaaaaataaaaaattagccgggcgtggtggcgggcgcctgtaattccagctacttgggaggctgaggcaggagaatcgcttgattccaggagatggaggttgcaacgagccgagatcgcaccactgcactctagcctggatgacacaggaagagtccatctcaaaaaaaaaaaaaaaaaaagtaataaaaaataaagtgccaaggcccctggggggccgtccctgaactgccagcctttgctaggggtggcctccctctgcttcacccccccaccccgggggctcctcctgaggcgggcctccctccacatcgccccctaccctggggcctgctgtcgaggcggggctgtgcttttcccctattttgttcctagaactctgcccctttaagtgagctggcagcacaaagcacctgtcacagggcatgaaaaaaaatgcatcaaggtgcctcaggattctcacagccaggggtgagggttgtgtggggaccctggccacagggatgacggtcagttcaggttggggcatctgatccccaaactgcaccccacaatctcatttccagctaattcctgccccaccctctgcccatccccccgggagacacagcccgctctagacatcccatcctgtgtggcatccccacccctgcctccacccaatgctgatctggcaatgcctagctccaggcccacaccaccctcccagacctgcgtgtcccccaccctcactccaacagaagccacaggacccccgagaacaacttgaatgttagcgtcagcacctctggggagacaaggtcagtgccccaaagccagtggcagcttgtgtttttttagacaaggtttttggagtgcagtcggtcacagctcactgcagcctcaacctcatcaagcgatcctcccatctcagcctcctgagtagccaggagtacaggcacatgccaccatgtcttgctaatttttctatttttagggggtagagacggggtttcaccatgttgcccagcgttcctcccgccacggctttccaaagtactgggattacaggcatgaaccgccgcacacaccacttgtatctcctatgcccgtgtcaagcagcagcagggcggtgggaacggctgcacctgcactgtggcagctcgcaggcctccctgacgtccaggcggaggctttctcaagtgtgggtgccttgggtccgacccaggaccccctccccagctcccgtcctgtggaggagaccccaccatgcttcctcaccaccggctggagatgtcctgaccccctgcccactgcgccctaacattactgactctaaaccagaacccagtgcccaccctgtcctcaccgtcctcaccccacggcattctgagtgagggacgcccaggcccacccactccctggactcacttctgtccccccgagagaccttgcccgggacatgtacccacctatgccctctactgcccacctcagccctgtgggacccagtggtgaggaggggagtcctcacggccagccaaggacaggatggtgacgaggggcaggggaacgagggccaccaggccttggctcatgatgcctccaaattccccagggcctccccagagcctggacaccgctgcatggcagggtgggtgtagcctgccagccacatgtcctctgccccacccctcgctggaaatgcctgtcccgatatggcccacgggtcctgccgttgcccctcaccatgctccctgatgtgtccaggctggcctgggggtcgtgctacctgaggcggcagagctgagccaaggtccaggaccagtttcaagagggtgggccaggctcctctgagcccatttctagggcagcccctgcacccttgccgtgctggactcggtggggacgtctgggtggctctctgcaggtgacacacgtgctgtggctggccaggtgggtggcaggtatgtgggggtggagctctcagctctatcactgccaggccctggggtgatgctgggcagagctgtccctgcgagggccctcgaatccaggagtgggcgagtccgggatggttccagagcttccaaacccacatccagcccaggatgtgagaagcagcccagaaaggcctgagccaggctgtcctggtggggcaggtactgtgggccccgcctgcccagctgacaggaggcagccagcggatgcccgggtgggaggggctcgagctctcagggtgtcccccagctaggactcatccagggcagggacccctcatgggaggatggggagtcacatggtgcccaggacccccgactgaggactgcagcagacccgtcacagcaaacggagtggaggcctgtatttcacacctgctcactcactccatggcttagaaaagaacacgtccaccgcggaggccgcaatgcccacctagagcaggtcgtagaagtagtccaggccctggcccagctcccagatagagaccccaacgcccagctcccgggccagctccagccgcacctgcagggactgggcacagatggaggtgtgagcacctgctggggcctgtccccccaacacccagggatgtcctccaggccgaggggcagcaccgcctggaccccaggccagtgcctgctgtgctgtcgcatggcccacccctcccccggtcccacggctggcagcacacgcaccttcagggttgggtagaagacgacgtgcctcccactgcggctcctgcaagacaaagggactgtcagcccatccgctctgctggttccaggcctcctcccctcacagccaaggtccacggcctgtactcctcccacccaccaggtggccacctgctgtccagctgtgctccagggccgggagcagcaagtgagctcgtgaccctgagaccccctgggccctgctgctccctcatctccacccccagggcccctccctgcacacaaggccaaggtgggccacgcacttcaaaacactcacttcttgtactcgaagaagtgctctgaggcctggctgtcccacaccatccggggcctgtggtccttcagtgtctggatgtacctggggagaccaggatatggatttgggagcccacccagctcccccacagccccaccctgtacccccaaaggctgtggctctcagcaggggcagggccactcggggcagccactgtccccagtggtctgggggacaacacctggtggggtggccagagccccaggccgtgtgaaccctgtattagaggaaacctcaggaaaaacatcttccaggagcttcctcggaagaagccaccccaccaagtcctttcagtggcctggagagtgacacggggcctgaaactgcctgagcctgagggtgaccctcaggccgcgcagcggctgctggacagggctcctcactctgtccagaccccaggtgagaggctaaccagacaggcctcaggctgccctggccccgctgctggccctggactgatgggcagtgcctcgtactgggtgggcagtgccttgtactggggatggctgcccggggcagtggtttctgcacctttttttttttttttttttgagacggagtctcactctgtcgcccaggctggtgtacagtcgtgcgatcttggttcactgcaacctctgcctcccagattcaggtgattcttctgcctcagcctcctgagtagctgggactacaagcacacatcaccatgcccgactaatttttgttattttttagtagagatgcggtttcaccgtattggccaagctggtctcgaactcctgacctcgtgatctgtccgccttggcctcccaaagtgctggaattacaggcgtgagccaccgcgcctggcctctgcaccctttcaaagactgagtctgcctcagtcttgaacaatgaccaccccatgcccaggacagcagcaggcccctcctgagcaccaagagtcagtggtttgagaaccaccccctccttcacacagaggacaggctcattcccaaggtgctggggacacgactgcggcttccaggtcacggggccctgagtgtgtgcacatctcacactgcacatttgggaccagggcaggtggttccagaagcttctggtctccacagacaggagtctgtgcaggtggaggcagctgacaatggaacatgaccagtgcctgctgcgtgaggacagtgccccccacgtgcctggggctgcagcctcagggaggaggcctggcgtggggcctacagcccgggtgccatgtgggaggggaggacaggcagtaggcaactgcaggggcgcagggacctgggccgtgtggcatggacatccgcaggatcctaaggggtcacagatggacagtgcagggtttatccaagtgagaaatggccacaggaccgcacctcgagccacctttctgctcctgcccaggagtagtgggatgtttgaggctcccaaacgggaaaggctgctgttgtcctgagcagggcagagtccccttgacactgggagcctcttccagactagggcacatgtcacttcagagctgtgaatgggagcagctgccacccccccagcagtgctcgacaaagtgccagaccccatcgggtagctctggccttttggggcatggaggctgctctgcagacatcagaccccggcaaacacatggcagggagggtgggaaacagcattcgggcagcctccccaacccagacagtttcccttagacgcctgtttctgtttttttgagacaaagtctcgctgtcactcaggctggagtgcagtggcatgatcttggctcactgtaacctccgcctcctgggttcaagcaattctcccacctctgcctcccaagtagctaggatcacagccacccgccaccacgcccagctggtttttgtatttttagtagagatggagtttctccatgttagtcatgctggtcttgaactcctgacctcaagtgactgcctgcctcggcctcccaaagtgttaggattacaggcgtgagccaccgcacccagtccctctagactctggtaatgggatggcagcagtggctggcagctccagccatcccaggcctggaaaaggactgctggacccctgccctcctgtggctgggccaggcccctcaatggccacatgcaaacatggtccttccagaagcccctccagaccaggcaacgtcatggaggctgccagcatagccacaaccccatcagacagctctaaaattactgcattatccttaactgaaacaccactcaaggtgttgttggtgtaatttgcagcgtcccccctcaatatctgctgggtggctctgtgagaagaatgggatgtgcagggtcgtgggcagatacctcagggcagggttggccctcgggctgtggggagctctggccacgccacacactcctcctcctggggggcctctgtggtcactgctcaaaatctgctgcctccaggaggaggtgaggctgggggtggccaggacccctgagagcactgggtgcctcccactcaggagccccagcctggtggtttggcgagtgggtggtgaccacgctgtgggggcagccatgaccagggcgctgtcagggaccccaaccccaggaatcgctactcccaagcaggccctggggacgaggagaagctggagcccaggtgctgggtgggggtgtgtgcccagctcccaaaagcccagggagggtctgagagtcactcctggggagggaaggtggggccacccggtataggggcggggctgagtgaggacgggcagctgcaggcacagcagagggagtccaggcccacagcagagggaggacagtcctcagagggccgcagacacacacaggggctgggtccttggggggcctgagtggccatccaggctggtaactgggacccccttgagggcttgtaagaccccaaggagcatggctggtgtgatggacaagcacaccaggggaccaggctcccaggaggaacaagggccacacaggtcttttgggcgcaggcaccagccacagtgagtggggagcgagcgaggggcctgcctgggaggaaggaagggccacagagagggcaggggaaggtgaaagtccgagagtgggtgcagggagcactgcaggagcccaagggagggacaagcacatggacggggaggatgtaaggaataaggactcaatgaacacggacagctcggcctcacagaaacatccagaacagacaaacctacagagacggtgggctggaggtgggcacaagctagggcggagaaagagggcacagctgctaaaaggcacagggcttctttttttggggagcagtaatgcgggctgtacaattctggaagcgtgttaaacgccactttgaaatggtgcattttatggtatgtgaatttcatccaacctcaaaaacagctgcaaggcctcaaatggaaagggccaaggaaagccaaacaggatatacacacaaaacacaccgagacgcgccacagagcaatttaggaggaccagggacagaggttcgacgcgtttctagggagaaagcagatcaagtgtgagaaagatgtccttggacctcctgatgtgtgtgtgtgtggggggcgtcaccccacggagaccagcttggaaacttttggagaaagggctgcagaaaaccaaaataagtgggatgagaggcttgctccaaagcctggggactttgccaaggtctaaaacgcaaggattaaaaacagagggggccgggcgtggtggctcacgcctgtaatcccagcactttgggaggctgaggcgggcggatcacctgaggtcaggagttcgagaccagcctggccaacgtggtgaaaccccatctctactaaaaatacaaaaaattagccaggcatggtggcacacacctgtagtcccagctacttgggaggctgaggcaggagaatcacttgaacctgggaggtggaggctacagtgagctgaaatcaagccactgcactccagactgggcgacaagagtgaaactccatctccaaaacaaaaagatagggtcttgttctgtcacgaagactggaatgcaatggtgtgatcatagcgcactgcagcctggacctccaaggctcaagcgatcctcccgcctcagcctcctgagtggccgggactacaggtgtgcaccaccacacactgctaacttttaacatttttgtagagatgggggtcttgctctgtgacccaagctggtttcaaactcctggcctcacgtgatcctccccactcggcctcccaggctgtaatgattacaggcgtgagtcaccacatgcagcaccccttggacttgacccaccggctgctagggctgtcctggctccaaaggtagagcagtcatggtatgctgtgagccgccctgagccaccattagaaaacgattccgtgtcctggaggcagcagacagaagacacagcctggtggtgcacagcttcctgcagggaaaagtgcatgaggcccggctctggcctcaggagtgtgtgtcgagagaagcccttcccaggacccctcaggagcccccacagggctctgcagccagctccaaggaacgggtccaagggagtggagctgcttctggctggtgggaggaggggcttgcaggctcgggccagggctgctgtgagcaatggtgaggcccccagtgccaggcccaggccccctcctgaagggaggacatagctgatggctggccctccccaagcccaccctgcagacactgaaaccccaggccaggtgctcctatcttcacaggtttcagttgcctctcagagcttgagttcaaccagacagccctcctcggtgggtggccatccttcttcggggctgtcctgtctgaaatgtgggatccagccatgtcctgaccggaggccctgaggttcaccgtctcccgctcggggaggcgggcgtggctgggcccgcaggtaatgccagccagtccctgcacctggccccattggggatgtgctcaggagctgctgctagtcagccaaggctcccagaggcacaagctgtagacactgagggccccgggtgtggagaagacctggctcctcgtcactggctatcggagagcgctggggtgttaggagaacacggtgagcatgaggccggggatcggggctggggttgctgaaactcttagcgccacatgaggccgagggagtcaagtcctggggtggccatgaggggctcgccacaccattctatgcacttctatgcttgaagattctcacagtaaaagattcacaagacagaggaggaaaacgcctaggtccaccgagtcgtggcagcaaaagacgccacggcagtgatgaggaccacgtgcctaagattcaatccctgctgctgccggcctcccagacgtcccctggcgggtgacagacaggatgaaggaacgatgggctccactctgcagaggacacagtataggctggaggagcgaggaggctgggactggatgactggctggtgtgggtggcaggcgccgcattgcttggcggtgcacgtggtgtgtgggggcatgtgaggctgggggctgtctgctctttagggcggtcgcagctaataagtgagatttcagctagaaaagcagacatctggtgccaacacaaggcgagaacagagggtgaggagaggcgtctgagctgatgtcgccagagctcagcaggagccggcacaggtgcaaggacagataagcctcgagaaagggccagggagaagagccccagcttctagaacagatagggaggacccacaggacaccccacaacgggtggcccatctcaccctgtgcacgttgcaggcagtgagcccttgggctggatttggtgtccagagtggatgacacctgtccagggcaggaccacagggtgcagatgaacagtgcagctgagagggaggtcggggctcagggaggggctggacaccacctgggcagagccagggtcaggaagaatgttccaaggagctgcgaacacggcccctccaccgtgcagacattcaggcggaggcaggagtgccgtccactcgtagacgggactctggcacagttgagagccaggaacctacccagggaagacactggtggctgtcaggcatcacactcccagcagcagggttgcctctgcctgtgatccttgccagtgtcctccttggactagagtgggcgtgccctccctgctgtacccttgaggcaggagccatggctgtgcagcgtcagcactctctcggccggctcggcagctgtgaggatgcacgtgtgagcgagtcttggcagccgtttatttattccagccttgcgggaggtggccctgctgagctggcatctgtgccgctgccctggccaaggtctctaggcagggacagacagggcaagagctactggccacccaggatgggacgtggggacgggcactctaggggcccctgagacccagatctccctatggcctgctcccctccagtggtcctgcatccaggctggagcctgccaggtgcccacacccctcctctgtgccactcaggcccagaggtcattaacaagggcacttcgggtgggcgaggagggcagatgaggggacttctcagctgggagtgaggacccagaagcagtgcctttctttcctgactgggtgcacacagaccccaacttgtgcaaagctggggggtcctgagggcatacacccccacacgctcacatacacacctttgtaatcagaattccttggccccaaaccccctagccaattctcagaacaatcatgggtgggtgcaactgcccacgggaagctgctgaaggctttggttgttttggagacagggtcttgctctggagcccagactggagtgcagtgcagtctccacctccacagctcaggcattcctcagcctcctgagtggctgggaccacaggtgtgcaccaccataccggctaatttgtttttaaactatttgtaatgatggggtctctctattttgcatagaagatctcgaacccctgggctcaagcaatcctcctgccttagccccacaaagtgctgggattacaggtgtgagctgttgcgccaagccacactgatgccttgtgtgacctgacccaggctcttgtgcagtgagtgagccctaactcatcaccctcagatggtgtaatgggctgagctgttcccctaaaatccacagggtgaagtgtgtgatgtcttgaatgttctctgcaaaattcacactgaaatgtaatacccactgtggcactgtggggaggcggggcctttagaaggcggcactgtggggaggcggggcctttagaaggcggcactgtggggaggcggggcctttagaaggcgacactgtggggaggcggggcctttagaaggcggcactgtggggaggcggggcctttagaaggtgactgggtcatgagggctccgccctggtgaacggattaatccattcatggactagtgggttaatggaccagtgggtgaccatgggcatgggactgtggctttctaagaaggggaaggcggcagctcgctcagaccctgtaccacggacaccctgcaccacctccggactcttcggagtccctaccagcaagaacgctctcacagaactggccacgggccttggacttctcagcctctataagaaataaactcctgtctgggtgcagaggctcacgcctgtaatcccagcactttgggaagccgagccgggtggatcacttgaggtcaggagtttgagaccagcctggccgacatagcaaaaccctgtctctactaaaaatataaaaattagctgggtgtggtggcacgtgcctgtagttccagctactcgggaggctgaggcaggacaatcgcttgaacccaggaggtggaggctgcagtgagctgagatcacaccactgcactccagcctggggactccgtctcaaaaaaaacaaaacaaaacaaaccgtggtggcacatgcctgtaattcgagctactcgggaggctgaggcagaattgcttgaacccaggaggcagaggatgcggtgagccaagatcgcaccattgcactccagcctgggcaacaagagtgaaattctgtctaaaaaaaaaaaaaattccttttctttataaagtactcagtttcaggtattctgttataagcaacagaaaacgaactaacacaagtcttaatccccagtgcctcagagtagcactatatttgaagaaatagtcttttttattcttttttttttaatttgagacagagtctcgcactgttgcccaggctggagtgcaatggcgcgatctccactcactgcaacgtctgcctcccgggtccaagtgattctcctgtctcagcctcccgagtagcccgccaccacacccggctaatttttttttttgagacggagtctcactctgtcacccaggctggagtgcagtggtgcgatctgggctcactgcaacctctgcctccagggttcacgctattctcctgcctcagcctcccaaatagctgggactacaggtgccctccaccacgcccggctaattttttgtatttttagtaaagacggggtttcaccgtgttagccaggatggtctctatctcctgaccttgtgatccgcccacctcggcctcccaaagtgctgggattacaggtgtgagccacagtgtccggtcacacctgactaattttttgtatttttagtagagacggggtttcactatgttggtcaggctggtcttgaactcttgactttgtgatccacccaccttattctttttcttttgtagagttagggtctcaccatgttgcccaggctggccttgaactcctgggctccagtgatcctcctgcctcagcctcctgagtagctaggaccacaggcctgagcctgcactgaggaagtctttcaagacgtgattaagttaaaatgatgtcacaagggtgggctgtaatgcaacatgactggtgtcttataagaagaggagaagaggacacaggcgcacatgggaccttgtgaggacacagggagaaggcagttatctacaagctgaggagaggccctgggatctaccagctgaggagagaggtcctgggaggagccgaccccaccttgacggcaccttcatctcatctcccacctccagcccccaggactgagacgaagctgttatttcagctgccccatctatggtactttgttacccttgaagactagtgcggtggcgactcaaggccaacacctgtctccctttcaaaagcccaaccagaattgaggcttccctgaaggcctgggtgagcagagcccacagctggagctgaggcagggctgggtgcatggggaggcctcttgctttgcacaggggatcctgggctgggagcccaagctctgtacatggctccacccaaaggtcccagaaccaggcaccatgtcagggatgtggtaaggtgggggacatgagctgtgcttccagagccttcccaggattcccagcatcaaaggagggccatggtgggggagggtgcagcacacacaggagcacagagcagccccaactgaaagaacagacagttgggcagacagggcggccgggcccctcactctgcattgcagggacatgagagctggcacccagtgactgacctgtgccccatctcagcaggaacaggggacccaaacgagccaggggccctggggcatcgccctcgcctgtgcggagccccgcgtgtctcagtgtgtggctgagttctctatgactcactgggtgagacgtgggagagaagacgccaggctcttcgccccgcctgatgcccaggctgaccccaggcccacctcagccagcaccccctcgtgtccgcccccgcagcagggtcaggccctgctcagtgacccagagcgcacccagggccagaagccagagaacagcgggagcccaggcctgtgctggaccccaggaccagccgtgtggacagagaggagtgtgcacgtagagtgtcgggggaaagcctccctaaggggaccaccacacacgaccctggtcttgcaacatggcccacctgccatctgccatggaggggctcacggagggcacccctggaggccgggcagggaacactgccccaacatactcctctacccactgctgccaccctcaggacccgcaaatccagcaggttacctctgcccctccccacggccgaccaggaggaatcaggggtgatggcctggcctcggctcacctgcctgggctgacacacgcacacacccctcacggagggcaggcctgtgggggacctgcaaaaactcgtaaagacgacagccgaggcctccacaaaaaggaccaggttctccagaaaagtgagcagctaaaactgtttctaagaaactcaactgcatccagaacaaagattaagatgatttataaaaatgctaaaacacccagcacgcaacatggtaaaattcgcaatgcctcaggcatcaacccgagagtaccaggcccacaggaaggcagcataataggaccccaaacaaggaggaaaagcagcctcctgaaaccgaccctgatatcagaaccagcagacatgggcactcagcagttcttacaactgaatcccaatctgcaaaagtttagtagagacatggaagacgtaaaggggaccccaagcaagcctctagagaattataacatgttggctgggcttggtggctcacgcgtgtcatcgcagcactttgggaggctgaggcaggaggatcgcttgagcccaggagttcaagaccagcctggaccacatagtgagacccccatctcataaaaaataaaaaaaattgaattacaacacgaggtgacaaaagcactggatgagattaacggtaggctgggtggtgagggaaaggaccacgtcgggcggtaggctgggtggtgagggaaaggaccacgtcgggcggtaggctgggtggtgagggaaaggaccacgtcgggcggtaggctgggtggtgagggaaaggacgtcgggcggtaggctgggtggtgagggaaaggaccacgtcgggcggtaggctgggtggtgagggaaaggaccacgtcgggcggtaggttgggtggtgagggaaaggaccacgtcgggcggtaggttgggtggtgagggaaaggaccacgtcgggcggtaggttgggtggtgagagaaatgaccacgtcgggctcaggatggatgggattaatggcaggttgggcacagcaagagaaatgaccaggccaggcacggggctcacacctgtcatcccagcactttgggaggctgaggcaggaggatcgcttgagcctaggaatttgagaccagcctcgacaacatggcaaaaccctgtctctacaaaaaaaatacaaaaattagcggggcatggtggcatgcacctgtggtcccagctatttgcgaggctgaggtgggaggatggcttcagcccaggaggttgaggctgcagtgagctatgatcacaccagtgcactgcagcctggacgacagggtgagaccctgtctcaaaaaaaaaaaaaaaaaagaaaacagagaaaaaagaatcccagcccggtgtggtggctcacccctgtaatcccagcactttgggaggccaaggtgggcggatcatgaggtcaggagatcgagaccatcctggctaatgcggtgaaatcccatctctactaaagatacaaaaattagcagggcgcggtggcagacgcctgtagtcccagctacttgggaggctgaggcaggagaatggcgtgaacccgggaggcagagcttgcagtgagccaagattgcgccactgcactccagcctgggcgacagagcgagactccgtctcaacaaaaaaagaattccaaaaggtaaaaggtgtattcgtgagctgtgggacaaattcaatggatctagtgtttgtggtctccaaacgagaagacagaagagaagaaacagaaaaaatatttgaagaatttggcctcaaattttccaagtttgctaagagtacgaatgcagactcaagaggctccatgaacactgtgcaaaaggaaaatgaagacacgtcaataaaattgttcaaaaccagccataaatacaagatattcctacgagcagggaggacagcaacacaggcaggagaaagaggtggcggtgaaacgctgtccgaatgagagggcggccacatgcttaaggtgccagtgaaaaaaccgacagccagaattctacagccaggaaagatgtcctccagaaataaagtaaagtaatgccaacaagaaaccacactcgcagagcataccaagaacacacaaagcaggaaattactcccgggcagaggagaggaggaggagcattcaacccaggaggccccggcccggcctgtatgctgtggggcaaggctgacgggtgggggaagcctcagtcccagcctcacgcagatgtggggacagcctcacgcagatgtgtggccgtgttatgggtggtgaccacagtgggggctgcggtggggtgggcaccaagcaggaccggctcctggcccagcccctatctctgactctgtggggcagaagccccaggggaccgagaccctccccatcactctgtctccttacacccacacccacccgcgcccagtgacaccttcagcacggcagggagagcccttggctcacctggccccgacaacaggctcacgggcatccttggaggtcgcgtagtccataccatagaagttgagccccaggaggattttgcttcgccacttggacttcgggtccaggacctggacgcaggctcgaacccaggacaggggtgcattagggccaggcctgcagggcaaggggtgagcgagtttcagcaacagggagggccccgcacctgagccatcattggggccctccactgaggggtgcatcctccccatgctgcggctgacacctctagagagttgtaaagaacagaagtcacccatcagaaagggctgtcagcagagcgggcccatgagggacgtcacgtccagggccaggatcacccatcagaaagggctgtcagcagagtggccccatgaggcatgtccagggccaggatcacccatcagaaagggctgtcagcagagcgggcccatgagggacaacacacccagggccaggcactcatgtgcggcccccaccccacagccacaggcaggagtccgcatgacacagtgggaaggaggtcagcagacacaaggccttctgggcatccttcctgaggtctccctgcctgcgcctgtgtcacacggccctcccacaacagtgtggctcaggcgaaagaggacagggcggcatcgggcagcagcaggactatgcctgtacctctggccgtgacccagctccaccagaggcagggccccacccacgtgaccaccacagggcatggggcaggtgcagtcccactggcttccctcaggtgggtgtccagactcagcaggtgaccttgtgcacagaaccacaggcaagagggcatcagctgtgcccaggagccccccaggtccacactcactgctgcactgtggagtttgctgtgcccaggagccccccaagcccacactcactgatgcgctgtagagtagtcgtaggtcatgaggctgaaaccatccagcacgggggccagctgctcaaactccttgtgcgtgaacatgcccagctggtcggtcctgtaacagacaggtgcagccacctcaggctgctatgccctgcctgaagcccctccccagctgcggttcgagcaagctgcctgtaggggacttgggtcacttttcccaaggggaaaagtgttcttctggggtggggacagcctgcagcttggttggggccacagaggctgggggctgggagacacagggggatgtggtcatcggggcccagaggcctctctgagaccagggtacagctgagaatgacagacctaatggcggggagacctgggccagggctgcccatggaggggcaaggtcagtggagagtggccaagaggatgggccactcccaagagctggggttgctgagatggaggtgactgatccaggctcccaggagcgtcccctcccggggtctgcagcaaagcctccctgaaggcagaagcagctcctgggatgcagccctcaagcccactcagggtcggcctggcccagccaggctgtccaaagccctcactggacctcagcaggtagacgggaaggacaagtgcttggctcccagggatggagcaaggctgtgtggcacattccccagcatgggggaaggggcgccagggcaggtggtcggctgcggacacctgtggcatgggcaccgcggaggaagcggccctgttctgtctgcctggcccctgggccatctctggatggccgcccttccctcggggacctgctccttcctgacctggatccactggggactagtgtctcctggggcagccttcccgcctggcccagggagagctgggtgctggcctacggcccctccacacccagatctataagccaaggggagacaggagcagtacatgaaggtcaacaccgagggggcggagggccccacggcagcaggacgtaggacaacagcatgggggacgcggccggaggagcagcatgcactgaagtgaggggagggggtccctgtgaggcagtgggccctgatctccctcagttgtgacccctcctctgctcaagggtcactgggctaccaaatctggaccacgccaagggcctcagtgctggggcttctgtcaggggcttgagggcccaagacacctcctgcagatccctggacccacctggcaggtctgaggagcgcctctccagatgtgcagttttatcccagcccctgccttgagtctaccaggaccaaggtctgggccttcctcctctgctgagcacaatgagaggcccaggccccagagtctgtccaccccaggctgtcccggcctgcaggtacgtggagcatcatccatggtcccctcagccccgacctcttttcctgatgcctgccagccccaccgctcaggcacggtcagcctccccagatccccgacaaacacctcccagcactatgcccatcactcccggtggcctccctcagtgcctgggcccttctctatagccaagtgcccctaagacttcagccccaaatccagttgtccactggaaccttcctgccctgcaacctccctctgggccgaggcctccacccaggtcctctcaccgaaacccaagatcatttcttttttatttctgagatggggtctctatgtcacccaggctggagtgcagcggcacgatcctatctcactacagccttgaacttctgggctcaagcaatcctcttgccttttttagttgattcaaaaaggaaaaatgggccgggcgcagtggctcacgcctgtaatcccagcactttgggaggccgagacgggaggatcacgaggtcaggagatcgagaccatcctaacacagtgaaaccccgtctctactaaaaatacaaaaaaattagccgggcgtggtggtgggcgcctgtagtcccagctacttgggaggctgaggcaggagaatggcgtgtgaaaccgggaagtgaagcttacagtgagccgagatcgtgccactgcactccagcctgggcgacaaagcaagactccgtctcaaaaaaagaaaaaaaaaaaggaaaaatggcggggtgtgatggctcacacctgtaatcccagcatttggggaggctgaggcaggtcaatctcttgagctcaggagttggagtccagcctggggaacacagcaagactctgtctccacattaattaaaaaattagccgggtgtggtggtatgtgcctgtagtcccagctacttggggggctgaggtgggaggatggcttgagcccaggaggtggaggctgccgtgagccctgatcatgccactgcactccagcctgggcaacagagcaagacaattgatgaatcggtcttgctgtggacagggtgcttgtgtccccacaaatggttatgttgaagccctaaccactgatgcgatggtttctggagacggggcctttaggaggtgattagagctagacgaggccatgatgacgcgccccatggtggagttagtgtccctatgagaagagacaccacagctctctgccatgcgaggacacagcaaaaaggtgccgactgcaccaggaagaggccttgccggaaggtgggcttcgggcttgccagcgcctctccgagtcggtcccaggtggcaccttggcccctcccacacagagccccccagctcacagccccacatcgctcaggtcctggcggcagatgccaggcagcgttggctgcgtcggttccatcccagcctggctgctcctgagccatgatctccccgtggctttcatttgtggttctctcatgaataacatggttgagcatctcctggcctgcccatcagctccatgcacgcatccactgtggcctctcgtggttcagagtccaggtctcctgcccgctgttctctggggtctttgttgctttctttcttttcttctcttctgtttttgagacagggtcttgctctgttgcccaggctggagtgcagtggcacaatctcggctcactacagcctcaagacctcttgagctcaagctcctcctctcagcctcccgagtagctgggaccacaggtgccaccatgtccagctaacttttaaattttttgtaaagatgaggtctcactatgttgcccaggctggtctcaaactcctgggctcaagcgatcctcctgcctcagcctccccaaatgctggcattacaggcgcgtacctccacacgcagcccgtcgttgctttcccaccaccgtgttcccattttctctcctctagctctctcaggtggtcatgtgctcttggtcagtggtgtgggcagcatcgtccacctggcgagaggctggtcttctcgctcctttgtggtgtcttctgatgcacccacatcctggtccgagttgtctgtgtctgtcactccttcctctcacgtgctccacggttctgcttctgacttgggcctttgctgcccctaggaccatggccagcaggactgcctgtccctttggctcctactttgccaatctcatggcagccctgtcagccgcagcttctactctgcaggggcctgtcccacagtccaacccctcccctgtgcccatgatgcccttccaagcaccccgtcccgcttcacacgctgctatcagacatgtggggtcctgccgtgagccgggctcgtgtgcctcccccacatccacggtgctgcaacgcccctgtccctctcgtgggcgccatgccctccaccacctcatggccttggccacaccaggcactcctggcagagctggcttcactccacaaggccttggtaggtgaggccacgtgtccaggatctggttcccaccagctacagaatgtggcacagaaaccacgaatgctccccatgcgtccaccagaaatgcagctccacgacatccccaagcaggaaggggcagtcctgccaggggacatggctccacaccacgcccctcagtgcagcatgctgacatgtgacatgcctgtggcacagcttgcattttcccttcggggctcacgcagccacccactgacccaacaactttgctacagctgggcaccaaccacggccgcaggctaagaacggtcctcacgctttcaagggtggtaacacaacacgagggaacaaagcaggccccattcagaggcggaagcagctcacggtggtgatcagtgggagaaagaggggagggcaccagtcctgtgcccccggtcctgccaacccccacctggtgctggccctgaggaccacccgggaatgtggacctcctcctacttgcaagaaacactgcaaaagggccactgccaggtgtcctccccagcctgtgtccttcacccagacacatgcgagagccggcagcagagccatctgtctccgtgccccgtggcacctggacaagaggggatcaccacggctgagcaatgaggtaacagcttgtcacggattagacgcagcgtgacttccgatgaacaggaattactgctcacaccgaaaacaccatgttctgcattcatttctgaggaacgaaagccccgggaggaaggaaagaaggaaaaggagctcatcacagccagctgccgaccctcccatcgccatgtcgtgggtgggccccatgcaggcagcggcatgcaagttgagtgcccactcggcctcgactggaccccgggcccacaccaacgccagtgcctgcccactcggcctcgactggaccccgggcccacaccaatgccagtgcctgcccactcggcctcgactggactccgggcccacaccaacgccagtgcctgcccacttggcctcgattggaccccggggcccacagcaacgccagtgcccctccccctccagacggctggacgcgctctgctcttcccgggctgcccctgctcaggctttgtgctgagacaggccgctctgtgccccagggccctgggggtgcactgcccagctggctgcctcacactgaacaatcccaggctggggcctgaccaggtccctccagccacgtggaccccacagctgccagaggccggggcggctgcggcctccagaacagcgtcctcccagatccgaggggagacggtgacacgagtgagcccacagtctcctgccatgtacccacaccgtccctccagcacagcacgactctcacgttctacctgcgaactccctgaaacccccacccacccaccttggtcctgacactgggcccacgtggcagatgccccctcttccctcggccgaccagctgccatctctgggtgacatctgcatcactgtagttgacgccaggcaaaaggaacgtcggctccacgtcaacccctcccgccgccatctgctggggtgggcccatctcttccctgctcctgcactccagctaccagaccctgtgggcttagcctccctgtctccctagactgtcatcttccagccacccagcaggggagagccatagtctctgacctccattcagctgacctccctccaggctgaatgtgaggaaggcgtgggcttggcctatggtccctagtccctgccagccacaccgcctggccctatagttgccacctgcagagccaggccccacagcagccctgagggaatgccagtccccaaccctaacagagatggtggcatcactgtcaggccccatagcagtccaagggaatacctttccccaaccctaacagatgctggcatcactgtccctgcaatctcccatgctcagggcatctgcccccagcagccagcggccacagctgttcctccacccacagctcccctccccctctgcccacctgtcagagatttctgaacccgctccccatggccttgggtcgcctggcccctgtctgctgctgctggcatcctcgccccctcacgatggctgctctactgttctcagcctgcaggcctagcccgctccccatggccttgggtcccctggcccctgtctgctgctgctggcgtcctcgccccctcacgatggctgctctactgttcctcagcctgcaggcctagcccgctccctgactggccggttagcaccctttggccctttggggcctgacctcagcctggacctcggcccgtccacaccgcacggggtgcctacggtcccccacagaggcctcaacacacactgccagcacgcggcctgccccatcccctgaggctgcgggcaagaggcaggtgggcgacgggagcaggggcctctgtgcaaacgtgcttgctggggatacggtgacggcgcccccatgcgtcacctttctctgactgctgagttgggctccacatatagcgatggccggccctgaaccacggggcttgcaggagctggccagggtcgcggccccgcccacctcagagtggaccactgacaacaaggccggcaacggcgccagcagggcccaggaaggaaaccagcccttcctgggttcctgaggtcagctccctggacccaagggggtcccagtagctaacaatgcccagaaaacacaaggggccaactagagagtgacccaagggttctgctcccatgttaaggatggcaccaccacatgggcacctggggacagcctgttggtcccactggcctgtggggtttacgctgtggctttgcccctgggtctcctccattgctgagactgactgtgggagcagggctggaggtccgcagagtgctcagttccaggaccagacaccctggggtctgtggcagctgagttagggctgcctctgtctgctgacgaaggacacgataaaattggcatttggcgactggggtgcccctccccgcagcacgcagacctctctccaggggccattgttccacagacagtgcccctggagagagcgagcctgtgtgctggcagcgctgctcttgggaggtgagtgacaagcacaattacgcgctgctgcaaaagcaccagggacagggatttacgaggctcctctgcagtggctgctcttccctcagagtgggatgggggaaggataaacagatgacaaaacagccctcctcacctctggggctgtagccagagtctcgggagaacccacgggagcctcagcaccttcaccggccccgccgactgggagggcacagccctgtgctccagtggagcgggcgcacaacagcagtgcccagccctcccccgagctgggtcccacttccccggggacccccaccgtgggcctcggccccgcccccagcctcgtcaccgtgcccgtagccctggcgtgcatcccaccctacagctgcaacccccaccagcgccatgcaaatggagttgtgagctttggttgctgtggggtgaggggcagggacctggcccagctccaactgcccacttcctgcctagggccagaagctcaggcagaggctgccaccagcagaagacaggcacctggtcctctgccccagcctcaagaactgccctgggctcctgagctggtccccaccgatggctgcttctgcagctcccctaagcacaaagggcaacctgggagccccatgaaatcagtgcctcacagaggtggccatgcccatggcctctggacaaggagtgtctgctgccccgaggaatcttcacccagccccaggcctgtagtcctcccaaccacctgagacaggtgctgtcagctctggaaggacgtgtcctcacagccagcccctgccagcccccttcaaaccctgggaacacaggtcagacattagtgccttacatcggaaaaggctggccacggtggcttgggaggccgaggtgggatgatcgcttgagcccaggagttcaagaccagcctgggcaacatggcaaaacctcatttccaaaaaaaaaaaaaaaaaaaaaacacaaattaactgggtgtggtgacatgtgcctgtagccccagctactcaggaggctgaggtgggggatcacttgagcctgggaggcagaggttgcagtgagataagattgcaccactgcactccagcctgggcgacagagtgagactctatctcaaaaaaaaagaaaaagaaaagaaaaagacgcagcgtgggggccccacacccgggacacaggtgagaccccagccctggacttgggcccgttattgccggggaggctgaggttgctgggctgcaggagcagaactgccgaggcacagccaggcccctgcccaccagcaccacccacaggtcagcccagctggcacataagggagagggaggggccagggcacacagcagtgctgcagacgggaggctccccagggctcggcctgggacaggacccccaacgcctggtcacaggcagagggagttctgtctgcacaatgctgggtacgtgtgcaagaagctcaggccatgcacgaagcagcccccagggctcagctctcagcacctcttctgctttccactttccagggtcttccatcaaaggatcagtctgagcccaacaggaactagcaactgcgctgtgctgggagccagaagggtctaagcactgcctgccccagctccaggggaggaacctggccacgacagcaggaccacgggcacaggtctgaaacctggtctgcaggacatgctgctgtgtctgtcccagcactgccttgcccagttgcagcccacactgatcagcggagagccctggaaagcttggagagaaaagtcggttgactgtgcaaagggccctcagcaacctacaggctgtgaaggaggccaccaagctgcctccttagccaggggtgctaccctgagggcatggccggcctgtgctggcacaggcatgtgcagggtggccgcctcctgtgagcacaaactggctcttctgtgagtccctctagccaaccttgggtttgggggtgcacccaaccgcacacagcgagtggcccgcagtcacctctctgcctctggagggagaggaggctgcagaggtgcagagggctggcagctttccagagtggcaggccgggaagcccagtgtctgcctgaggggctgccctgggcagaaccctgggacttctgcctcgacaccctggggtgcccccagccaagccagccctgcctggcctctgtgactccccaacccagcctgcttctgtccacttggcccccaggtctgcccctgggactcacgtgctgacttggagccttctctgtgcccagcacaggggcacagagtgtgtggcagctgaagcctctatacagacgggatgaggtttgggtgctgagcaggagggcctgggccctttggccgacaccctgcactggctgcccccgaccccagagccctccacagccacccccacatctcaagagcggcacttacccgggggtgatggcaggcgggatgaccaggagggccagcagccgggcctggtgcagagcctcggccaagtgggtgagcatgtggatgaggcccctgcaagaaccgagagatggggtcagcagtgcctggcactgaggcctctcccagggttctgtgacacccgctgcctcagggaggggtggggctggtccccagcctgacaccctgcagcagggcaggtgggccccttcgtgggaacttcctatccatctctggatgtagccccaacaacactgtctcatgccccagtgggccccctagagtgggggcctgtgcagtaccccaggaatccccagaaagaggggctccaacaaccagagacagccccacgtgtgtacatcacactttagacacctaaagacatggcagattaaaaaaaaaaaaagctgggcacggtggctcacgccggtaatcccagcaccttgggaggccgaggtgggcagtcacccgaggccagatcggcttggccaacatggcgaaaccccgcctctactaaaaacacaaagattagcagggtgtggtggcaggttcctgtaatccgagctactcaggaggctgaggcaggagaattacttgaacccaggaggtggaggttgcagtgagctgagatcgcaccactgcactccagcctgggctgaagagcatgactctgtctcaaaaaaaaaaaaaaaaaaaaaaaaaaaaaggacacaccaggtaagaaaaggcccccagcaggcccaggacactgatccgagggtggccgcagggcactccaagggccccacctgcctggtgtagctcagggaaggagagggcagggcaccgggcagggcaggagacagggagcagcagttaggcctcctctggcccctggaggtggagggggcaggagcatctcagagcaggctggcagtgttccccaagggatggcactagcctccctcctagcacggcctaggagcagccgtcaggaccccaggccggccgtgtgcacacgctggtgcccatgagtctaccctgcaggtggcctctgcagaaactggcctggagcacatgctgctgcaaagctgggtttcagggtgatacgtccacactgggcaggctctggctgttaccgcacgtaggagactgtcactctcacgctgcaggcccctgggagcagccccatctggggaggagacccaccccttaggggatgacaggaggactgagagtggggcaagagccggcccctggtggccccaggtcccgccccactccagcacaagcctctgtggggctcagtgagaaccgggttaggtcaggacgaggtgacggttcctcagccagtacccagaggccctggtgctcccaatggtgccaggaccagggcctggcatgtgcaactgctgcatagtggcagctcctgtttccctgacatggcccaagtgggactgtcattttccaagccaagcccccgtcaattcctgggtaactctggcccacatcatctggtgttagttctgccggctgcaatgcaggtacagtcctcagtggggagcagtgtctttgggcagcccgtcctcacgcctctgcagctgtgtccacaactctatgggtaccagaggctgtcacacactgtgcgccacttagaggtggtggtcaaggagggtgctgcccccgcccctgaaacaccagagcaaagtgagcagagtaagccctgcccagatgcctggggaagctgaccctacctgggggtctcctgcctggttcccagcctgtgggctctatgctgtctgcaggtacccacagctccccaggatggtggtgggatggccttcctccagggccacaccagacctgagggccaaaaggtgcccccagccactctgtgaggggcccagggagcctgggtgtccacccacagtcaggctcacggtgtggcccagagctggccttcaaggaggacaggtgtgagtcaggtctacccaggcccccaggagacaacatgggccccggaggcgacgtgagctgcagctacagtgctgcagcattgcccggagcgctcctcacgacagaccccctcatactgccagctgctggcactggtggctccgagcgcccctaacacagcccctctgggcatgcggacaactgtaaggggctgatccagagctcaggagggaccagaggcagcaacatcccttctaagggcactgccaacaaactctgcaggaaaagctgcccctgagcctctgtccagggcccagtgcatgggaccgaacctgctgagcccagtctcgggcctggcacaatgcgggctggggtcccaagtggtggtcagaggcaggactgtgctgaggcagctcccaggcagcagaatgcccaaaggaatctgccaagctgctctgaggagcctggatactgcctgcccctgccatgctggcagctcccgaccttcctgcagctccccaccttcccgcagctccccaccttcctgcaggagcctggacacgaggtgctcgcaggctgctcccaaccgtcctcccctgcagtggccactccggctcagcaatccccctactgcctcctgccctcccaccctgacgttaatgacccgtcgagccctgacacaacgaggccgtctcagcacccgcagcctccaccccagacacaacgagcctgtctcagtgcccccagcctccaccccagacacgagcctgtctcagcacccccagcctccaccccagacacaacgaggctgtctcagcacccccagcctccaccccagacacgaaactgtctcagggcccccagcctccaccccagacatgaggctgtctcagcacccccagcctccaccccagacacaacgaggctgtctcagtgcccccagcctccaccccagacatgagggtgtctcagcacccccagcctccaccctagacacaacaagcctgtctcagcacccccagcctccaatccagacacaacgagcctgtctcagcacccccagcctccaccccagacacaaggctgtctcagcacccccagcctccaccccagacatgaggctgtctcagcacccccagcctccaccccagacgtgaggctgtctcagcacccccagcctccaccccagacgtgaggctgtctcagcacccccagcctccaccccagacacaatgagcctgtctcagtgcccccagcctccaccccagacacgaaactgtctcagggcccccagcctccaccccagacatgaggctgtctcagcacccccagcctccaccccagacgtgaggctgtctcagcacccctagcctccaccccagacgtgtggctgtctcagtgcccccagcctccaccccagacacaatgagcctgtctcagggcccccagcctccaccacagaaactaagctgtctcagggcccccagactccaccccagacacgagcctgtctcagcacccccagcctccaccccagacacgagcctgtctcagcacccccagcctccaccccagacacaacgagcctgtctcagcacccccagcctccatcccagacacgagcctgtctcagcacccccagcctccacccgacacaacgagcctgtctcagcacctgcagcctccaccccagacacgagcctgtctcagcacctgcagcctccaccccagacacgagcctgtctcagcacccccagcctccaccccgacacgagcctgtctcagcacccccagcctccaccccagacacgagcctgtctcagcacccccagcctccaccccagacacgagcctgtctcagcacccccagcctccaccccagacacgaggctgtctcagcacctccagcctccaccccagacaagaggctatctcctgaggagcctctggtgccatctcactgcctacctaatgctctgaaacggaaatgagtgtggcaaatctctggttaatagacccactctcccaggattagtgagaaggctggaagcaggcgggctctgtctcctgctgagacacccctctcctcagagggtaatggaaggtcagccccggcagggtccactgcccacggctcagcaagaaccccccaaggcagggcctgggattgtccctcagccaggaacgcaggcacctgatcctccggcaaagctggggcccctcagaggctgtgcagacgacaggctccccatagccttgcggacatccttacccccactgcagtgcgcctcccagcctcccttcacacagctccttgtcttcctgctgctgccaggcctcccaggagggaagcagacagaggagcctcttggacacatccggtggggggcacactgaggggtgctggctgagggagtggggtctgggcaccaggatccagtgggcaaccacattgaggggtgctggcggagggtgtggggatctgggcaccaggatccagtggggaaccacactgaggggtgctggcggagggtgtgggggtctggacaccaggaaacaggactccagggctcttctggagccggggcctgggagcagttccgggaagagccttggactgctgcctcccagccagtgagtccctcagagcacagtgggaggagcggcagggctgcagaggctggagccactcacaggggcagggcctgtaccggctccaggctgagggtcctctgagcccctgggcaggaatcctgccctacccctcatgggctctgcctcaacaatgtcccttccctccctcaagcttaagatctgtgtggggacgctgccccaggtgggcagagcctggacctgcagctcctttgcccacagcagcaatgggatgaaagtgccatggctgctgcaggggacaccatgcagcctgagctcaggcccgggctcttaaagcccaaccagaactacttcaggtggtgggggcgggggagccgattccagaacccacggctcacacagaaggctgaagggctggacagctgccatagggctctgctgtccaggcacccgcggtggagaccgcaccatcctcgctcgttgcaaccagtggagtgagaggagtccacctgtcctgagcatgtcgaggacgccccctaccaacatcctggggagcagtactgtccccctgctatcttttgcggggcagtcgcccactttggcagaacagggaaggtagctgtttcggtgagttggcagggctgcttgggcaggaccaaggaagggccattcctcagggctgtggtcagtccagtccaggccaggtgggggagccatggcacttcctatcactccctccgttcctggtcatgtggcccacagggagtgggaacccgcgagggtcatgggtgggctgggctctgatgtggcaaaaggaggcgtgagggagtgctgtggccgcctcccggtggagtggactgctacaaagcctgggggcctgggaggcattccccagaggccgccatggcggtccacaccacgggtcctggccgtgctcagggacacccccaggaaggctccccgaagctcagtgaggagtttctgcttgtgtccaagctcaacctgctgtcaccatctgggccatctttctcttgccaagacctcatgaatgagggtcctcgagttcctctgaccgcccaagggaggcatcaggcctggcgcagcaatgcgctcggagccggctgcctgccacaggctgcttccacttttctgttcggagccggctgcctgccacaggctgcttccacttctctgagcaggtgtccatcttttgtgcagccccgtccccaccccaggcacagggactgtggaaggaaggccctccccaaacccctggtctttcctccagcctccttcaaacaccagggccaggaggagggccacccaccaccacctgtgcccactcacacgcgcttctggcttagcagctggttccagacctccaccacgaagccatcgaaatgctggttctgaaagaagcagtcacaggtgaggagggcctggaggcccaggagggatgggtggaaagacaagaagcccgccacctcggcccacatggtcaggttgtggcctggtcactcacgaggcaagacccaagcctgggctgtatgcccagaagggcctgtctgaaggaggaagtgtgggggtcccagaggaacaggagtggaggggccagtggtctcgtgcattctgccgacccatgcacctcccccaaccccaccccgggggtctgggggctccctgacccgaggcccaggcatactggcagccagcagggctgggtcccctcccaggagggtagcaggcagctgggctttgcccaagggaagaaccctggcccagcagacaggtctcccatgcctgggacctccagaggacccatggtcaagaaagcgagcagcagcctgagcctggctgatgctgccttccctggaagatgggggctgcaccagaaggtgcccagggcagaagacagaaaagccgagtggaggcctcgcgggaggcccagccagacggccaggtgggacccggggggctgtgctcagaggctggagcagcacacaggtctcacctttgccacctggaccacggtcttgctcagctcctctatctcatcctcactgtctaagacgttccggaaatcatcgtaagtccagtcctcaaacaggagccgaggcactgcaggggcaacagacacacacgggggccgtgactgggagatgctggagggcccctgctgtttgctgcctcaaaaaggcatccccttggcctccagagggaagtgagaccagacagtgaggggcagggaggccacctggagcacccacatgtccagagaggatgtcccagagcctcacaggctggagagggaggggtggtggggaaggagcgagcagacactgacagtcctggtcccctgacaccagctccccacacggctcagcatggttgtggccccaccttacaggagggaggctgggacagactctggctgctccagctcagccctgtcacctgcttctagcatcccccagagtctctcccttggcaacttgtgctcttaatccactgcctctgaggctgctactggacgtggggacacatgtccccccttccccagccgtgagctacaggggcacagatgggccagggtcagcatcaccctcaggccaagcccagggcttggccccagctgccctgataggactcatcatgtgaatgaaggaagaaatgggattgagaacaattagggcaatgccactggccaaggaggtgctggctttggagggccacagcctgtgtggggaggagagctcaggactccagccagactaagggctgtgaatgccaggccagggccagcctcatctctgagcggtcaaagtaacctgtgccgcagcagcacagccgggtgatcaggaacacgtggagaccccagtgcccacctgtccacccccgcagtttgagccatcagggcctccactcctggcctgccgcacttacctatgtgcaggcccttggcatgcttcctgacagctcgcatccaccctgtgggacatggaggggacagtcaacacaggcacgtgcgcccaactggaagacccagcctacctgaggaggaaaacgtggcagccgcacaatacgcaatgggaagggcaggggcgggcaggcaggtgtgagaacccacccctccctggcccagggctggctctccacaccctcttcctgaccccaactctccacccttctggccaaggcccccttcctgaccctgcagagcagctctgagcttaccctccctgagctgggacagctcagagcctgtggccggccaggggaacaggcagctgcatcctagggcctggggacggtcagggtttctccgagctgagggatggccagacccgccaggccctgacactggctgacattccatcacctccccacggttctctcagtgtcagggaaaaccactcctgctctctgaactccaaaactgcctaacacttcccctgccatttctctctgtccgagcccaaacgcaaggcgcagccacgtaaactcgggcagacgtcatcaggtcaggatgtgccatcaggaggcagcctccgcctgaaccccaccttcctccctggcattgaatgaaaatcgctgagagagggacagaggaggagaagccaatggcccgtgccgtttgctgcccagaggctgcctgagtcattgtagagcctgtcctgcacacgcctgtgtgcagcccggaagtgcaagggaaggccaccctcacagccacctggaccacacgcagacctgggcggaacactctgaggcaccaacttggccttgcagagggtcccaccgtggcgaccacctcagaaaccccctctaccaggcctgccctgctccacactcaccttcccacttagcacaccagcccacaccatgggcctgctctgccggctgggccccaaggggtgagggcgtggttctcacagtcaccacactcaacactcacacccactgtctcacacttagacatgtccacaccgacagtcacattcaacacactcacaatctcttctctcccacatcatcagtctcacacttacacactcacattcacacttaaatcacgcagagacacacacacactcccatacagagacacccacagagacatacctactcacacacacacacccctgctctcgcactcacactcttttcagcctgtggggcaagcacagtcaagcaggaaggatgagaaccttggtccacgtcgtggaggcccgtgacctcaaacatctcacggccacgtctcttcagctgcagccagacgggtgagatctgtgtgaacttgctcccaaagaccttggtgacatcgtagccatggctgttccactggcaaaagatggagacatcagacggaggacaggtgagtgagcacctgtctcaccatggtgctgtcattctggcgcctctggacgtgcccagggctggccagcgtagacagataccagcccggactgacatcagctcctggcctggggtatccttctcctactctggactgccactcacagcctgggacccaggccacgacatccctttcaccaaaagtgactggtgcttgtcttaagccccacctggagctagtgcacaccactgctgcaggctggcagctgggaacagcaagagaagaggaggctgggtgtgagaacccacccctccctggcccagggttggctctgcacatccacttcctgaccccagacgacctgcgagcccacctctggattcagggggaacccacagagatcagcacagcaagcccctggagagacccccagggtcttacactctgacatctccagaatggcatctctcccaccgtagcctcacagcagcagcagctccgggagatcagaacatagacccccatcactgactggccagaagaggccatcacggggccagggcagcccacctgagcctcaggacctccctctgcactgtgagggccccaacttactggagtgacatagcccagtacatccccagcaaagtgtctgtcccgggcctttgccgagcagtagctgcgatgctcaagaaccacactctcagctttgaggtccgtcacgaccaaaccccggtcttgcaccggcttatctgaaaactgactctgaaataaaaggagtgagagaaaagcctcagtcatctgtccacagtgtagagcacagagccccacccagcaagtcccttccattcagccagcagccgagtctctggatccacacagtgctgctgacccggagaccctgtatgttgaggatcgaggccacagcaggcaattcaattcagaagcactctggccgtcaacagacactggccgacggtacagggcctttcccacccttgctccgggctggaaggcaggcaggcagacagacagttatggtggctccctccttgcatgtgagggtggacggtctgcaccagctctggccactcgatacccatccgggcactccagggccatacgctttgctggacaagaacatgccaggtgcgctgggtgcattggctcacgcctgtaatcccagaactttgggaggccgaggcaggtggatcacctgagatcaggagttggagaccagcctggtcaacatggtgaaaccccatctctactaaatatgcaaaaattagccaggcatggtggcgggcacctgtagtcccagctactcgggaggctgaagcaggagaatcgcttgaacctgggtggcagaggttgcggtgagccaagatcgcgccattgcgctccagcctgggcaacaagagcaaaacttcacctcaaaaaaaaaaagaaaagaacatgccaggcacacgccaccatgctggccaaccactgcctgccaccgcccccgccaacgtgaccctgctggccaaccactgcctgccaccgcccccgccaatacgaccctactggccaaccactgcctgccaccacccccaccaatgcaaccctgctggtcaaccactgcctgccacccccctggccaatgcgagtcttttcctgccatgtcacacctgcccctactccacctctgctcctggaaaccttccatccagttatcaacttgtctcttctgtccacactctgtggcccggctcagcctccccttgacctcgccccaagcggccccgtgagagagagatgtccactgcatggtttatttgcccccatacagcacagagaaagcatctgccagtccaggactaggtcacagttacagtcctgtggcagggtctggccagcggcatggggactgctggggctgagaggtggttctatgagtttacacccttgaaggtgcaatccccagggccatcccaggggaacgtcccaaaaagcatgaggcaaacacagctcaaggccatgataaagacagcaagatgaagatgcaggtgatataaacgagaggtagagcatggaaactggcaactggcacataaaacaagccccacgtggggtgagtggggaggcaccctgcttgccctcaaaacctggctccagaggctgctcactcagaggtgctgactggccagagccccagagccacacaggccacccaccggctgcgggctcatcaggtgcctttgtgaggagccaagcccctcgagcctcctggctcacaggccccagtggacagaaagaagaggatgatggatcagccctcagccagtacagtcacctcaagtccccaggccacccttaccttctccagcagcgtctttgaggcggcttttttggcatctgactttgacagggtagtgtgaacagggctgcaggccagggcaagccagaggaggttgaagagtgtccgcatggtaggtgtgtcacagtagggtccaacctcggggtccagagggctgcagggaaagcagagcacattcaaacaaccggcagagaaatgcagcacatgggcaacccctctgctgatggggccactttctcctaatagggcctgggtcctcatggcactggatggacccttggccactgggacagagccctgacctggaccagccctggcggccacagtctattctccagtactcctgggcctcctgactgagccactggttcctcctagatacccagaaagaagcttcctcaccatcagccacagaaccctcccctcacagcccaaggccgccctgaccaccactggcaatctagaaaagcattggttcccacctcctccttcaaacccaaagaaagccaaaccatggtagggcttaagtgtaaaataatgaagccacaggctgggccacgtggcggctcacgcctgtaatcccaacactttgggagaccgaggtgggaagattacttgagctcaggagttcgagaccagcctgagcaacatagtgagatcctacaaaaattaaatatttgggccgggtgcggtggcttatgcctgtaatcccaacacttaatgggaggctgaggcgggcggatcacctgaggtcaggaattcatgaccagcctgaccaacatggtgaaaccccatctctactaaaaatataaaaattagccaggtgtggtggcgtgcacctgcagtcccagctactcgggaggctgaggcaagagaatcgcttgaacccaggaggcagaggttgcagtgagccaagatcatgccactgcactccagcctggggacagagcaagactccatctcaaaaaaaaaaaagaaaaaaatcgtaggctcagagaagcctacgataataacgatgatggtggtgatgccacgttaagtactaggagaaaatatagctacctatttatgcagtctcagggtggagaaggcttttccagctatatgagcaatgggagagattaggaaagaaaataccactggagtagaactacatacaaatgtaagactttcattcaggaaataaagaaggaaatgtgaagacaaataataaaccagaaagaatatttggaacacacttgacaacggatttctacccataatctattcataacatgcaaataaatctcacaaatcaagaaaagacattccagtaaaaaatgtcccggctgggaacggtggctcatgcctggaatcccagcactctgggatcccagccaccaccacacctggctaatttttgtattttaatagagatgaggtttcaccacattggccaggctggtctccacctcctgacctcaggtgatctgcccacctcggcccccccaaagtgctgggattacaggtgtgagccactgcgcccggctgtgggacttttttttttttttttgagttggaatcttgctatgtcaccacactggagtgctgtggcgccatcttggctcactgcaacctccacctcctgggttcaagcgattctcctacctcagcctcccgagtagctgggattataggcgcgtgccaccacatccggctagtttttgtatttttagtagaaatggggtttcgccacgttggccaggttggtctcaagctcctggcctcccgtgatctgcctgcctcccaaaatgagccaccgcgcccagccatgggggattttccacatacgttgaaaacatgaggatgttcatggacctggctctcccagatgctggaacacagacaggcactgccatgctcgtggtgtgccggtcaatgaagacgctacaagacagaacttccacagttcagtcccacagagaaagcatgtagggaggggtggtagaaagcaaacgacatgcccttcacgtggaagcttaagaaacaaaacaaaaaagtagcctgggcgcgggggctcacgcctgtaatcacaccacgtcgggaggccaaggcaggcagatcacctgaagtcgggagttcgagaccagcctgaccaacatggacaaaccctgtctctactgaaaatacaaaattagctgggcgtgctggcgcatgcctgtaatcccagcttctcgggacgctgagacaggagaatcacttgaacctgggaagcagaggttgcggtaagccgagatcgcgcaattgcactccagcctaggcaacaggagcaaaaactccctctcaaaaacaaagaaacaaaacaaaaaataaatgagcaggctatctggaattactggtcattgtttcttctcttttactttatctgtatcttctggtcttcctgcactaaacttttattacactgttcactttcaggttctaggggccaccaacaaaagtgattctactttccggccgggcgcggtggctcacgcctgtaatcccagcactttgggaggccgaagcgggcagatcacgaggtcaggagatcgagaccatcctggctaacacggtgaaaccccatctctgctaaaaatacaaaaaattagccaggcatggtggcaggcgcctgtagtcccagctattcgagaggctgaagcaggagaatggtgtgaatccaggaggtggagttcgcagtgagccgagatagtgccagtgcactccagcctgggcgacggtgcgagactgtctttaaaaaaaaaaaaaaagtgattctactttctatctttcactggggttgggggcagcggcggtgggagctgaaccaccaccatagcccagccagactgttagtccttcatgaagctttgggacactgctgggaagaagctcttggctagtttcacagctctggcagcacagacccctctagaccagctgagaggcccacacagcctgggcagaggcagatacctgacaggtggggagctcagcccaactcactacccagcagctgggcacatggccttccccttgggtcacaggctcctgagtatatgggagctcaggcccaagaggctccaggaaccccagccaggcaggtgcacctgtcagaagatgctgccagagccaggcctaccacagtgcctaccctcctacccaaaagactccctggccaggaacctgttttcacttcctctgaaaccgtccccttgacctgctttcttctgcagaggcacacgctgccccactttgccctgtctcttccctgggtgagactggtgctcctggtgcagactgaggagactgtggctacccccaggcagggagtttgcatgctttggtacccaatacacccacaacacacctgcatagaaagaacacgctcctggagcaagatcaaccagtgaagctcccccacctaggaggcagggagccacaagacagcctgacctgcaggcttatggggagttaggaagggaactcacagggcaagcacagcagcacccagtacatggagccacaggcaaaggcagtgagtgcttgaacagccacggcagttccgagaggctgtgcagggggaataagaaggcccaggcacagatcaccaccctctgccccgatcaacctctccagcccctctcctcagtgatacatcccagaatcagaaccaagggcagcagcctgctgccacctccccttagccccactatctttctgctgcagctgaggcttggtctgagtcagcaacagccccagggaaggtggggagggttctggccatggcacagggaagacggcccagaatcacttgcctggccaggctgaaacggtggctgcctcagctcccaggcacccagtctttgaccccagcccattccatgaccactggctccttctctgtcttctgggtggaaatctgggtcagggaggaaggaaaggaatgaaaaaccaaacggtggttctccaggggactggcccaggagtaactggagggcacactcaggtacccagtgaccaaccactatagggctgggtctctgcccctacctgccgtcctgcagatttgaaacagggccactgtccacccacctagtggcccctctgcctatgacctccctgccccccaacctgtgatttcacacttcagggaaggaagaggaaagggtggaagaggaagacagtcctgccagcatgtgtccagcagaggggacactaggagaacctaactgaacacaaggccagggtactgcctctgtccactcgcgcttaacttgcccgctctgtgatggagtgcttggatacaggctgctcacaaatgctgggctgcttctttgacttgccatggaactttccagacaactgccccagggagatggtgtgtgtgatgtgtgaggggtgctcacactgcaaccaggcccttgtctgggctttggtacctctcccgctccccactgctcaccggccgctcggctctgaggcccgtgaggacactctccatcatgctcttcacataacacagactcccaggttcacacacactgtgttcctgcatcaaaccgtttcttccccaaatgccaatgaccttcccttgggcagaacggccccgcacacaaagggaatgtgttgtgttatgaagaggcacaggccccgaccctggtcacccaaaggggtcccagaaaccgctctgtaacaagataaggtggagcgctactgctcccactttcctgcgctcccagtccgtaggtccaggacctcctcggtggtgttgatggaaatgatgggagtcacagcaggggctttccaatgcttttcatggagaccagcagtaagaaatgcactttacgtcacagcccagcacacgtgtatgtcatgtgtgcacatgtgttgtgcatgtgtgtacatgtgtagagcgacagcagccaatcagagctaactctattctgcgatggacgcactgacaactcctgttctgttgtgttttgaagaactaactggtgcatggcggctctggcctgtgatcctagcactttgggaggccaggagtttttgactggttttggcaacacagccagacctggtctctacaaaaaatatttttctgccgggcagatcaccccatcaggagttcaagaccagcctggccaacgtgatgaaacccagtctctaaaaaagatacaaaaattagctgggtgcagtggtgtgcgcctgtactcccagcaactcgggagactgaggcaggaaaatcccttaagcccagaagcggaggttgcagtgaaccgagatcgcgccactgcactccagcctgggtgacagcgtgagactctgtctcaaaaaaaaaaaaaaattcttagctgagtgcgctggcgcacacctgtagtcccaagtagctaggaggctaagagattactagagcccaggaagtcgaggcggacgggcgggcgggtcaccctccagtttggacagtcagcaatggaagcttcaagggttggggctgaaccaagggtgggtgggatcgcgtctgatgcgcccacccttcacggggaccgcgtgcccctcactgggagggcagcccgcctggagccctactgcctctgctccctctgggggtcctggggacccgatggccaccactctgccacacgagccgcgcgctcacacactcctcacccgccggccacatcccttgtctgcgcactcaggccccttccacccagcgcgcctagctctcaggcttgctcgccccagcgcacgcgctccacctcccactcgcggtccccccgacacgcgcccccgtccacactcgccctccacccccgctctcgctcaccctcgctctcatagcaaccctctctcaccctcgtcctcacaccctctcacacgccccctcacacacttgctctctctcacgcacccgcccggcgtcgcccgcgaccccacgcccgtcctcccggggccgagcctcgctgcccggcgcgcccactttgcgggagggaaactgaggccgtgcaaggaggaggagcaggggccggccgccgcggggctcacctgcatgtcagggaggccggacggccacaaacgcacggccggaaaacgctccagcgcgccggaagtcccgccccaggcgcccgcgcgccgccgccgcgcacggcacgctgggatggagaggggctgggccaggacaggggactgggcagggctgcccgaaagtcggggccggggccggggccggggccggggcggggccgcgccgggggcggaccccgggcccggcgcgttcaccttgagcgcccctggtgctcgcgctggagctggttatcaggttcccggcccaggggtagccgggttcccagcgccacggctcttaggcaggcctggcgcccttggcgtggggccgcgcggggccttgggctccagggcctctgcccggctcggcggtgccgggagaaccgcgcggtgggctccgccccggcacgctcccccggggacccggagtcaccactcctggcgtccccccgacccccgcctgagtggaccatctccatccccaggccgatggcgcccactgcgctgtctccagcggggactgcccgaaacgcgcgctctctcggtccgcacccccgccttgcacattgcacgagccggagccccaggaggcaaaccaagttcccaactcagcccctcgcgcttggatgaacgagcgcgtggccagcacttttgagtcaccgcgcattctacgcggcacaggctgtccgacccccacccccagccctagccgttcccagcgcagtttcctacagaaaaccgcacggccgggccccaccctgccccgctcagccgttcccggggcgcgcgtgggctccaagacaccctgcacagctgcttctccatttctgctgcttgggagctttctccttaaactaagctttgtctttctttctagtcacgtttccttctttcccttcccggtattttctgccagctgacgcccacgcctttcctagaaggggctgggggctgcatgcggtgcgaggcacgtcccccaccagctgtgggctcttactcagcttagcactcgctctcagcaaacggcctggatggtggcctgaagcctgacctttgggggtgaagacctcaagtcggcagagctctggagagggtcccagtaagctatggcaggtgtcctcagggacatatgcgcagtcctcccaatgctaaggaggccatggcaacatccaacttctcttaggaaaggcacttagccattttaggatctcattgaggtcagaggtctttggcgctaaagaattgcagaatcgatcgggcagccgccgcctttaatcctagcactttgggaggccaaggcgggtagatcacttgaggtcaggcgttcgacaccagcctggccaacatggtggaaccctgtctctactaaaaatacagaaattaggcgtggtggcgcatgcctgtaatcccagctcctggggaggctggggcaggagaattacttgaacctgggaggctgaagttgcagtgagcagagatcacactgcactccagcctgggtgataaagtaagactcggtctcaaaaaaacaaaaaaaagaattgcagaatctacttagggttcactctgggccagaactacagacctcaagagcagatggggcccgcagatgggaggataggaagcccagagccaggcccctctgcagagctcccaacggccgggttcctgggggagtcttgtcagttgccagcacaaagcggtccgcttcccaatctgcatagtttgtgccaatgggccccgtgtacctgcattgaaaactgacttcttggctgggcgcggtggctcacgcttgtaatcccagcactttgggaggctgaggcgggcggatcacaaggtcaggagatcgagaccatcctgattaacacggtgaaaccccgtctctactaaaaatacgaaaaattagccgggcgtagtggcgggcgcccgtagtcccagctacttgggaggctgagacaggagaatggcgtgaacccaggaggcggagcttgcagtgagccaagccattgcactccagcctgggcgacagagtgagactctgcctcaaaaaaaaaaaaaagaaaaagaaaaagaaaactgacttctttaggtgggcacccaccttttagccttaggaagatgctgaatgatacataccaagatttaggagaatcagaaccgaagtgttagcattcctgtattaagtgaaacttgaacacatttcgtattttatgtttttggaacatctaagataacttgcagttcaccacatttaaaatttgaatctgttaagttgtatgagtttttagccaggtgcagtggctgacccctgtaatcccaatgctttgggaggccaaggcaggaaaattgcccccccccgcaaaaaaaaaagtatcacaatgaaataaggtttcactctgtcacccaggctggagtgcagtggattatggttcactgcagcctccacttcctgggcttaagcaaacctcctgcgtcagcctccccaaatgctgggattatagacataagccacctcaccaggccaatgcatgagttactgaagcacccgagattctgttatcaattcagacaacctaaagcacgcaaaaaggagtgaaaagaggcttcatttataaattgtttgaaatgttgaaaattgcttaattgagtttatagatgggaccaaatattatgcagaagcccctttaaagtgactgcaggccaggcgcagtggctcacacctgtaatcccagcactttgggaggccgaggtggacggattgcctgagctcaggagttcgagaccagtctgagcaacatggtgaaaccccatctctattaaaatacaaaaaagtagccgggcttggtgatatgcacctatagtcccagctacttgggatgctgaggcatgagaatcgcttgaactggggaggtggagattgcagtgagctgagattgagccactgcactccagcctgggcaacagagtgagactctgttaaaaaaaaaaaaggccaggcacagtggcacatgcctgtaatgccagcactttgggaggccaaggcaggaggatcgcttgagcccaggagtttgaaaccagtctgggcaacatggtgaaaccccgtctctactaaaaatacaaaaaaaattaatcggacgtggtggtgtgcacctgtaatctcagctcctcaggaggctgaggtaggagaattgcttgaacctgggaggcggaggttgcaatgagccgagatcgcgccactgcactccagcctgggtgacagagcaagactccatctcaaaaaaaaaaaaaaagtgactgtaaagtcttctaggcttaaaagggaataatagggggtttgtaaaattgaacttaacaggttaataaattgggttttgaatttctaacttcaatgtattgaaattaaattttaataaatcaaatcctaattgttgaaatttaatataaatccaagcataaccaccttgcccaggcactaaaccagccctcagcccccattcccagccctccttacccggggtgggtgtggagtgccctggcggaggtccaggctctgccctgtaggcccaggtctgacctgccctgaggccctcctgcttgcccactgcctgtctgccgtgggcatgggggggacagagtagggcaggggcaggccggtggggtgaggaggcctgcagagatgagtgtttctgctgctgactggatccctgctttaggagaccccatgccttacctgggatattcctgggtccccagcctgaggatgcctctcacagacatcctcaaaagcactcgaaggctgggagtggtggctcacgccgtaatcccagcacttcgggaggctgatcacttgagcccaggacatcaaggctgcagtgagctgtgattgcactgctgcactccagcctgggcgacagataggaccctgtctcaaaaaaaaaaaaaaattactcacacctggttgttggaggtgcctggtggctgtggggcctttggggctgggtttgtgtcttccccaggctggccagtgctcctgggtggggtcgcggcggctctgggcgactcctcatttgcagagtcagcacaggcagggcccttcccaacagtggcagcctcgtgactctgtcctgttctaactaggagaccttggcctgggtcacccaagggcaggacctgggccactattgctgaccacgtcctgtcactcctaggccttgaaacattctagttcagaggccggaagcccaggaagagagggacacacaccagcactccctgctgcctagccctccccacctgtggacggagacatcctctctgggtgctgggataagcaaatccagggcaagcaggagggggaagtggcacactcacgcccagcggaagcttctggatccagtgccagagccagcacagcagttctctgcctgtgttccacgtgtgggcccccgctggcccagccggccctggccagtgacagttgcgtgtaggtgtctggttggttgctgggctgatgctgagccccgaggtgggcatgtgtggtggcacgtggccctagctttgtgtatttgccctttgcaaaggctgcgtgcgtcacggcaccattgtgggttttatacttctcactatcacacagccaacttaaagtaccgcaagctggctgggtgtggcggctcacatttagggaggctgggacaggcagattgcttgaacctcaggagtttgacaccagcctggacaacatggtgaaacctggtctctacaaaaacatttataaattagtgagtcctagtggcgtgtatctatagtcccagctcctcaggaggctgtttgggagggtcatctgagcccagggaggtggaggctgcggggagctgtgatcacaccactgcactcctgcccaggtgacagagccagaccctgtctcaaaaaaaaaaaaaaaaaaatctaggctgggcatggtggctcacgcctataatcccagcactttgggaggctgaggcaggtggatcacaaggtcaggagatctagaccatcctggctaacacggtgaaaccccgtctctactaaaattacaaaaaattagccgggcttggtggcgggcgcctgtagtcccagctactcgggaggctgagccaggagaatggcgtgaccccgggagttggagcttgcagtgagctgagattgcgccactgcactccagcctgggcaacagagcaagactttgtctcaaaaaaaaaaaaaaaatctgaaagcaaaggggaagggccggctgcctggccttgatgagatcaagaggtagtatttctccgtggtggtgggttgaatggcagcccccgaaagcttgtctaagttctcactcctgtacccatgaatgcaacggtgcaaccatatctagaaataggatctcagccaggcgcagtggctcatgcctgtaatcccagcactttgggaggctgaggtgggtggatcacctgagatcaagagttcaagaccaagcctggccaacacggtgagaacccatctctactaaaaatacaaaaattagcctggcatggtggcgtgcacctgtagtcccagctactccagagactgaggcaggagaatcccttgaacttgggaggtggaggctgcagtgggctgagatcgcgacactgcactccagcccgggaggcagagtgaggctcttgtctcaaacaacagcaacaacaacaaatagaaatagggtctctgcagaggtatctagggtgaggatcttgggatgagatc

SEQ ID NO: 106 - DNA, 370744 bp, Homo sapiens
  source 1..370744: mol_type = genomic DNA
cggtcttgacgaccatgcagactttcatatgccaacaaagccggtgcagtgtacttttccaaaagtgctccaattctccttttggacaactttcttaaacgttatttaccaagctaataaaatgtattctcaatggactttttactctgcttacatctttgttcttactcatcccaaagcaaagaatggaaaaaaaatgagttgtacatttagccggggaagggaaaggcaagtactgaggggctcctttttcatttactgatgccaaaactgaggctgtggaagataagttacgtccctgatgtcatccaagtagtggataccggaaccaggaattgcacagaattgtccagctccaaaacccaagcaccttgcttgggacccactggggttgcagtgaaggtggggggctcagaggtgactgcacacgggtcatgcatagccacagtcattatatggccagagttttaaacattattttgttctgtcttcaccatagacttcatcatcaatcataactgataaggaaaattacacttagctgaaaagccaagtcccgtgctagggaggcattttctgtatgttatttctatttccaataaaacaattctttaaaaagaaaaacttattatctccatctttcagatggaaagactgaggtttagtaggcttaaataatttgcccgaggtcactcactagccaaggccagaactgggatttaaatccacaaatattccaaagtccttttgtttctgtatcacttcacagggagctgcttccacctgtctcctgtgcccttggtttctgctaatcctacattccaagaataaaagtcttcctatgcgttcctaggcagaagccaagtttccctgctttgggcacgttcaaaatagaaggtattttccgcttctcttgcttctgagcacccacgaaatcaacacatccccaaaacacgcgttgagggagtaagggaaagtgtcctgcacccgccaccctcccgcgctaagagcggcagaggaccccacagcttcgtacttccccggaggagctcctggagtaggagacggcttctagcctggaagaaccccgggtgcgacagttgtgccaggaaacttcaagagtattccctcggctgggcgcacgcagtacatccccaatgctccaatttgaactttgactcggccacgaccaccccactccagtctcactctacggtgctttctcccctgttggtgctgagggcttttgagactacctgccccgcgctccctaagtccgagggaccgaggcgaggacctgtcccgctgagctggcacgacccacgcagggcaggcggcacttacgcggcgcagtcggtgctcctccctgagccgcggcgcgcaaggaccccagccggttgtccttgcagcgcttcccaaatcaggcagaagtgaggcagccccacccagtcacgaggaccctgcagaactcgagcctttaagcgctcctctaggctcacatgacccagacccacagggcaaaaagtgcgtcgtcgtgtcccaacctcctggtcccagaaacctggccgcatcaagtcagcgcttcccatgctggaagaagcaagcagccccagggtggaatcttaaaaattaatgaagagcatcggcggggtgccattcaggttggtttgtccctttgttttattttgattttgtctcccagtttttaaaagctgctatcttaaaatttcaaccctgtattttgaaattatttctgcactctaggacttacttgcaagcccaggatttacatttggaaagcgagtggtgtttgattcccactgtttaaaaaggcaacacacgttcgctgatggtctacattccagctgcactagcagtaagctcgcaccaagtgccactgtcctgccaagcactctcctgaatcactgcgctggagtctcagagccacctgatgtgttctgtaccattatacccattttgcaattgggggacacaaactaagtgaggttaagtaacccatccagggtcacattgcttgtaagtgacctgagtgtatattattagccaccaccaggtgctgggcatcgagccagacagtacgggagcaagaactaaaaaaggcaaggaggttgcaatggcaagtagataacacaaaataaaggagggtcatcattatcagcaacagcagcgtcaactgccagacaggtgggagaggccacggggaatcttctgcactgtcccgggccaacctccatctcctcacagctagctgcaggagtgagcccagggaaacccgcagtagagcagcccagccaacccgacagtcagggggaaaaattgttttaagccactttcagtttcgcgtagtttgttatgcaactaaggctaactaaagcactagttttacgagctggaacaaactaatgtcactgaatatctgttttctcctaagtacctactttattgggttgttgtgaggactcactgaaaaactatgtgtaaatcacccagcacaaagtatgtgctcagtgactgcagtcattctttgctatcataccttccatatggaagtacttcctacccacctagctctttaaggagaaaaatctgtttgtgggaaaataattcttttaaggccaaaatcagcccacctttaatatatgcaggacccagggcaaaagtacaaacagagatctgtaggccagatacctaaatatttaaaagttataaacaaagttaacaaatgattaagtacaataagttctaccttcctacctagacaaatataccttgggaattgacatgaaaggccagattgaaactttggatgatctgcacttaaatatgatggtgcagggagaggcgatttccagttcctggtttgcagccacctcctctcttcccacagggctctagtccattggtggaagctcggtcaagcttcccagaagcagctgtcccccagccacctcttgggcacaagagtatgaacaccagagtcagcaatgttcgcccatgggagtacagacattagcagataacactgctgctggcgtgcagacccttgaagcaggctcagtgccatttggggagggaatttggaatttgccttctaaagtgtgggccctggacaagggctccttgggtctaagtataaggacaactactggccaaagaatacctgtgcccacgtggaaccacttaaaaactaaactgaattttacagtaaacacaggaggagccatgctgtaagcatatttattcaaaaacagggtgtcccaaaagtcttcctgcagttttagtaacctcaaggctataaatgctgcaacttataagaacaccatttgaaagttaatttaacactatttatctctgtgaatgttgaataacacgttttaactttaatttttgtttcagttcccctgagtgaaatatggcatacattaaccagaagagaaaattacatttattaaaataattaaaacagagtcaaaagaagtaaacgttcaaatgagttttgtaagtttgtagcatttcgacttaagaagttattaaagcttaaaactgcactgacctttttggggtaccctgtattcggatttgtcgtgtgtcaggttctgtgctagacacttgattaaaaagaaaaaacaagaaaaaagatagtcttctttagggaacttgaagtttagttgtggggaagggatgaaggggacacacagattgatcccatcatacaatataagagctgtaattggggctgataaagtgtgtgtgtgggggaacagaggacagggaccaaatgactctgcccgaagagccaggggaatcctgtcagaggaggtgacttgaagctagacattaaaaaatgaatagccactgaggggaaaggtggcagcacaggcaatgagcaggccacctgcactcaggttgatgctgtgctcttggacagatggactgtgcgacaccaggcgtgttcagggtgggtcgggggttaactaatactgaggttagaaaattagactggagccagcttggaaagggcaagaatgctgagctctagagactgatgttgttcaaaattagtagattgggaagtctgtttccctttttttttttttttttttttgagacagagtcttactgtgccgcccaggctggactgcaatgtcgcaatctcagctcactgcaacctccacctcccgggttcaagcgattccctgcttcagccccccgagtaagctgggactacaagcacccgccaccacagccagctaattttttgtatttgtagtagacacggggtttcaccatattggccaggctggtctcgaactcctgaccgcaagttatccacctgccttggcctcccaaagtgctgggattacaggtgtaagccaccgtgcccagcctggaaatccattttcttaatgaaagagaataaaatagaacaaaatagtacagaacagaatagaaccataggacaggagtatgtgctttccagggaggttgtaactgagcagctattaacagtagaaatttattgtctcatagttctggaggctacaagtctgaaattaaagtgccagcagggccaggttccctctgaaacctggaggggaaggatccttcctcgctgcttctaggttctggtagccccaggtgttccttggcttgtggcagcatcaacccaatctctgcttcagccttccagggctttctctctgtgtcttttcacagtgtctcccctccatgtgtctgtctctgtgtcccaatttcacctatttatgaggacaccaatgacattggattagggtccactctaatgacctcattttagcttgattacttctatgaagactcattttcaaaataaggccacttcactgctgcaatagatatttttagcccttctcttgtattgagaatattcaaaggttggccaacaaatcggtttgcaaagagattcgttaagccttctttgattggctttcctgaaaacaagatttaaaactgtcaggtcgatcacaagcccttgtgttctctgcacctgcatattctagtgaggtttgggtttgttaagccctagtggttcagagcatgggtcagactcagtttgaatctagaaccttgcacctaatgaccataagcaagttacttaatctcagttttctcatctgtacatgataaaaatactattagctatcttgcggtattatcaagaggaagaaataagatagtagtacatataaagtgcttgtcatatataaaggctcaaaaaatggcagctgtaacaataataatggtgatcatgacaatcaagattctaggctgtgactgcagttctttccaactgtctatccaagacaactaaattgtatctggacaccacacaaaaacatgcttctcactgacctatagccggagctttgctgaactccttaaattccagttaagaagacacagagaatagatcatttacacatcttgatcaggtaaatacaattccaattgtctaagtttgtaggtctgattttacatttgcagctgctgccagcaagataaatgtggagctgcaatggaaacaaggggaattgattaaccttgtaggcaatcatgcccctcttggaagtgtctaggtctctccctgcacttgtcaaggcttctatagccattgttccttttcagtgttgttactgatcttcaatggggccaccgggtagcctggaaacacagctcagaggcacagcgaaaagagaaatgtcacagcccccatgcaccacaattaattgttcaataaacacttttcttaaggaacgaagccagatgtgtcacacccacacacttgcaaaacaacactgtgctattaaaaaagggaggggtgggtggtagatccagctgaagaaagtctacagctgttctgcacctcagctataagcattgaaggcttcattaagtgagaagtaggcccaggtggcggtaaccaagctctaagacacagacacatgccctgatcaacttattgaagtgcttcagtctccttgtacttggtaaggaaggggcacctcctaagactagccacaggctacagactccagggaagttgtggataattacatggtaattatttctaataagtgcttccactcttagcatgattatccttccctgggttgcttgcctccttatgcctggtttatgtagggaaacaatgtccaaattaatctacgtcttttgtaagtgagcctatactcctttgacgatccagatggtttagcgccctttagcagcaggtgttaaggctttcttacaaaaggcatattttcagtttcccttcggctatggaaaaagccaggcaaataagacttcggtgatttaaggataaattatgggattaatatagacatggccactaaggacagctgagcaagccctgtgtaaaaccaagagaaataatcatagtgaaactttgtaaggattttatggtttgcccaacactttttatatatatcatctcttttaattttcacatcagccctgcgaggtatatattgatattatgatgaacctgccagtgtgctcaggatagtatctgattaagggcatggccttaggagtagaccgatggcatctgaatcccagctcagccactcattagctgtgtgacctttgctgtgttaattaacctctctaagccttagccttctcatgtatgggaagagaacaccaccaatcctacaaggctgatctgaggatttgacgaaattgtatgtatagccatcaacacaatgtctggcccatagcaagcaggtcattcactggttgaaggaaagacatttgcaaaggacaaacagatagtaaacaaactcccttaggtgaagtagtatttggagtctcctctttttctcttgtttaggttttattttattttcttcgaatggaaatagtggttagtgcaggtgctctgcttactcatattgtgcctatgaagagttgcatgatccaaagtgggttatctagaaaagtgactctatagcctctgaagggttttccagaacttcaagaactaggtcacatcaccaaataaaggaatacaagtaaaatgggcaaaaggtatttcttggtaggaatgctcaagcaattgcataaaaccttatgttgctttttatgcgtggcagctcaggctagactgctcagaacttcttgctgggttaactgctatggatttaaaggattcccccttgattctgagacagctacacctaggagcaccaagcagtgagaaagagaaaaggtgccagaaagccagtccccaggtctctttgttctctattctcagttcctggctaaatctttcttgctttcctcatttgaaaatggaagtcataacaacttacccactctatccacctttactgagccaaggagtctgaatgcactagctaaatgatacagtgcctgtcttatgccacatgtgacaccatgatcactaatgtgatataaattgcctgggcttagtttgttcccatccaccccacccagagatctatcagcaaaaagaaaaaaggaattatcccttcttctcagtagaaaagtgacctgacacagagctgttaaattctgggctcttttgctctgagacggttggaagagttaacgccattttgtctctttcggtgcaccccattgttaagtttctctcagtaaattttgacaagaaacaggcaagcaaaacaaaatacactcgatccttgttattcgtggattccatatttgcaaattctcctccatggtctgaataacaaggacctcagaattctttgcccaaatgtccacaagcttgcttccagagcctgcatgccactcttccttggagtcatcctctatctgaggggtggccaaaggccatgcttacagagctgggatgcacagggaaggatgtccaggagaaggacaggtgtaaaggtagcactctacaccaccatgttgtagcacagaacttcaggaagtctcagaattataaactcaaattgattatctaggttgctatcaaggtatatctttcaaggtaagagggtatatttcatttaacagtttgttccctggtttataagtgttacatatctagacatatggtatgtgggcctctgtgtgtactcttgccccaagcctccaaagaaagaggcaggcttggaaataaataaacatctgttgatttaaactacagttgacccttgaacgcatgtgtttcaactacacaagtccacttatacacggatttttttctagaaaagtgacactgagtgtgtccaccttctctcccacctctctaccttttctggttttgccacccctgagacatcaggaccaacccctcttcttccttcttctcctcttcagcctattcaatgtgaagacaatgaggatgaagacctttatggtgatccaattccacttaatgaacagtaaatacattttctctcccttataattttcttttcttttagacagagtctcactcacttttgcccaggctgaagtgcagtggtatgatcttggctcactgcaacctccgcctcccaggttcaaggaattctcatgcctcagcctcctgagtggctgggattacaggtgtgtgccaccacacccagataatttttgtatttttagtagagacagggtttcaccatgttggccaggctggtctcgaactcttggcctcaagtgatctacctgcctcggcctctctaagtgctgggattacaggcatgagccaccgcacctggcctcccttatgattttcttagtaacattttcttttctctagcttactttcttgtaataatatagtatataatatgtataaaatacaaaatatattaattgttatgttataataaggcttctggtcaacagtaggctattagtagttaagttttggagaagtcaaaagttatatgtgcatttttgactgcacagggggttgacagccctaacctctgcatttctcgagagtcaactgaactaatatctaggacctgtttgtcaccacatcacagcctcatttattctgacagttgcccctggggaggagggtggtgggcttctcattgcagaatctgtggaacaggatgccagcagacagaggaggggccccagccagcagctctgagtaagtgaaggaacaataagggcaacagcagtgtaaatgctggagatcaggcccctctccattcgtatgcagtgaatcagcctctagcatgtctgtatgagctaaatgggtggggcttccccatcccttctctttgcctcccttcacctgtagattttggatgttcctgccaaactcagcaggtgtgagctcaaactggattctttttcaaaaacataaaaagagatgacacttcttatactctagatgtcatgaaacagttcacacctgatcgatatttaaagaagtattattattaggctgggcacggtgactcatgcctgtaatcccagcactttgggaggccgaggcaggcagatttcttgaggtcaggagtttgagaccagcctggccaacatggtgaaacttcatctctactaaaaataaaaaaaattagccaggtgtggtggcacgtacctgtggtcccagctacttgggaggctgaggcaggagaatctctagaacccggaaggcagaggttgcagtgaaccaagattacgccactgcactccagcctgggcgacagagtgagactccgtgtattagtccattttcacactgctgataaagacatactcgagactgggcaatttacaaatgaaagatgtttaattgtacttacagttccatgtggctggggaagcctcacaatcatggtggaagacaaggaggagcaagtcacatcttacatggatggtggcaggcaaagagaagggtgcttgtgcagggaaactcccctctttaaaaccatcagatctcgtgagacttattcactgtcaggagaacagcacaggacctgcccccatgattcaattacctcccaccaggtccctcccacaacacgtgggaattcaagatgagatttgggtggggacacagccaaaccatatcactccatctcaaaaaaataaataaatgaaaataaagaagtattattattatctaaacttgggttgcaccatttcagggaaaacaactacattttaacaacataagttaaaaagccattatcaaaaataaataaatagaactctttccaatgctaagaggaaagacaaggctgagagaaaagaaagaaattaaaaggtattaaatccttactaccagccaaagtcatgctaagtgtatcacacatgaggtcattcagcccttactgtaacccgaaaaggtagatattatattctccattttctaatggatgtaacagaagaatagagatgttcaaacatgtgtccaagatcaaagagctactgagtgtcagaactggaattcaagcataggtctctctgacaccaaaactgccatttttctcacctctttgtctagctgcctccactccaatctgaagcttggaatacaagctttggattcttccaatcatcgtcctgcttccgtgtttttaaatcctgtcctttagcaaggtcaaccgtggacagtcctccctcatcgggagccaggagggtaggctggctggaggggtcctgttgacaaatctcatccttgtgatggattttttttttctaggcctcaggacacctggaaaggcgaggacatttctaaatgccctctgtccttcagaccacatcggagcgtcctgtcagggtctgtgagctgggaaataggccctgagccgatagatctagagacggccacgtgctcttgcacagcctagccagctgtgccccttgggctgttagtgagaaaacttacttttacatttaatattggttttcttcccttaaatcaaaagagtgctgagggataaaccggcgaagcatggtgagagagggaagagttaatgtgtgcaaggtgagccctcagacagagaaaactggaaaaccatatatttacttttgagttttttgacattcaggtctatcttccattcccccactggactcgtctggttttgcctgtgtttagaagttcttctgtggcctgtcgccttccttgcaaatctgttgcaaagtaattacatcttagtattgggatctgtgtttcaaaaatgtcaaaacaaatttcgatgattaaatgccaaaattaagcttggtacttctctaaaattgatatgaaggacacattttaattagaaattataaatctgaggcactgtaccatcaagctacctccaaaacccgaaaactccataaagctctagctctgaggaaaaaaaagttaaattcaatctaaagatggcgatcttgtgaaataaccagccatatgtcatctccttttattggggctgaaattttgccctgaggcatctgaaggaactcagctaaggcatccccgataaaggtcatctgtgagggaaactttgtgggttttttttcctctttagatatctataaacgctaattaaatatgcattattggtgtaattttgaccaaggagctttatgttagtatgaaagcgactatgtattactctccagcacagcttacacaagcattatgctaaattatcagatttttagcttctgcatagctaaagaaaaagtccaagaagtcataattctttatcaaaactgacagtggattatgcacctggagatctatctagcaaaatctgccttgcattctcaacatgaaaatcctgtggctgccagtaggtgatacatctaattttaacacaagaaaagacatctaacaaacatcaaaacaaaagctacccttcgagctcaattttctttttcacacattggtccaccctacccccacttgatgtcagcaggaagtaatctcgtctgtggaaaggaagccagcctcctagctgcaccgacaaattgtagggaaatgaaaaggcttgatgattgctgaattttatccctctttatttccaaaagaataatgaagagctgtcttttctcccacttaacatcctaatcacccacatcagcagtttacactgcagctacccacacctctgagtggggaggaaaaaaagaatgagatgcgacccctcccccaccctgctacacccattggaacctgtcagtactgcatctttaatcaacctcaaaattgcaatccttctccactcaatgcccagcccctgctggtttagggcactacatagcttgcagtaaactgctatccattattcctctatatttagaacttctctagagaaatggcgttatctcagtcactaagctggaaactttaaagttagcttcgcacagtggcttattcacagtctctttcatggacccttcattcaccttgctttaaaatgttcagactgatgcacaactacaaaaatccaaagtatgaaaatatcaccctatggaaaattgactatgatttgcattttgctaatgttgggataggtcaaatgttatttctctccgctccataatgtttcattggagataaatcctactccccttcaccagtgaaaagccactcaatgacctgaacaagatctggtgatagaaaacatattttcaataacactaaactcatttttctgccagaacaaattagtcagtagctatctcatatgtcacagaggtttcaaagaggcacttaggaggatgctaaaaaaaaaatccttctatgtagattattagaaatgtcatgtgctaatgtaaaaatgctccggcagtcctttcattttactcttccttatgaaaatactgtttctcatttgtgattccactcctaaagagatgttttttgaaaatggttccaaagagaaacggaaggaagtgttatcatttagcccagaaaaggcaagatggcagggaggtaatcaaataaaggagaaaaaagacacaatgagctcatcactcctccaaattcccatctccactgaacactggttaagaagaggggagtgggctgtattggtaggaaggtttccttagagttgagtatattaagaagagcatgagttccggaatgaatgaatgtctacaatcaaggactatcttccttcagtgttctttgccatttgaaggaaaagcagtttatagcacacacatattttcttaggacctcagtttccaccatcctataatagagcaaataattgctactttttattgctgtagagcagattaaatcagatgatgtgactaaaacatgtaacatgatgtctgatccataaccaaagaaaactagaggaatgtgtaaagctatgatgtgtgtgggtaagagtggggatagctgaatcctgaaaattcaggcagaatggctcactttattttattgtgtagcctagtctttatgtgataatattgatacttaagtttaccagagaggaaaatatttccttcaacatcctctacgagatctgttttcacatgtgtagagctgactgtatgcctgaataggtgaattatgcatttcacccaactttcttttataatttgagtcattagacatggccgtagagttaacagtttaatataaaagtgttcctggagattttgcttgttctttttggactgtaatcaaatgtgaaagagattagtagtagcagtatttgtgatttcaccctattttaaatatttacagatgcttaactcttagagagatacttctgacattccaacacatttcagctctgtataaacattcctttgggggctttcattttgttctgatagtaaaaattgctagaggaatgtaactgaaaactgatttccaaataagataccctgcggcaatcgaaatatcctatgtagttattatccactgtaaagtacactttccctcagggaatctgctatcagagaaaattaaaacctagccacccattttaaagcccattaagtcattaggtggctcttcagtgttttcctaatgggctacacagcacaaggagccctcccagagccagtgagaaagcattgtgcagactcctgcaagcagatttctttatctgggagtcacagaagtttagacctgagatggaccttgaaaattattcagcttcttccacttgcagaagaggaaactgagcacagaagaggtcacgtggttttccactatccacagctggttagaagcagaataagggttgaaacccaaatgcctgcagcatcctggcatcacagagccttcatggtcttaaaggtgggatgaattattctataccagaataatgttttggatggcagtattggaaaactatctgccttgaaagttgcttcagatgaatgaaaacctattatttttaaaaagtaaagcacttcaaatgtgttttatcatgtaacatgtatgtgttatcattgtagttctcctatgtagagtgatgaaatggggtggctaattcgagaaaacctcttcccacacaagtcttatgcctcctccttccccgcttcgtgcagaggacattttgctcaaatgtcaccttctcagtgagatctaccctgacccccctatttaacctacctcacagcacacatcctgggattactgatcccttttactctgtcctgtctcttcttcaaagcacctatcacctgctgacttactatgtaattcactcattcttatgctagaaaataagccatgaaaacaggaaattattgtgatttgtctcaactagtgtaatgcaagtgcctagaacagtgcctgacataaaataatgcttaagtatttgtggaaggacgtaattaattgtccccaaatggcatcctttgtgtgcccatgggtgcacgtcattttctggttggtggtcatcttctgactagatgtgccctgtccatcagcacacagtgttgtggagagccaatcttcattattatcttgcctcactaaaagttaaacattgtgtccttctggctctctgataaagaaagctcactttcctaagatcaacatggtttcctggccctcataatatttctacatgtttaaatcttactcagtttgctactttctagagtcagttgatctaaaatatgtactggccacccacagtgtgtgaagttggtgccagatgttcacggtgacagacatgagcagtacattctggaacctattagactaatgtttcataaaacttatctgattccctgatgttctcccatcaattttcctgttcctgtatgtggctgacaacgttactggcttatccatgtcattccccttcctgtttggtatctccttttagtttgggcaataatgtacccaggagttgagtcatgtttgaccctagtcagtcatggctaccccttttccctttgccactgagtggtctacaagtgggtgtgtaatccagtcctggtcagtgaaatataatgagaattctaatggagggcttgggaaagatttttctccctgtcagaaggtaggggaagtaccacaatcttcagccctaaccccagcaccttgactcctaatttgggtggtgtgttgtgaaaacgtgatgatgcctggtgctgtggtagccatcttgtgaccatgaggaaaaaccacatatgcactgaggcagagaggaagggctaaaagagcctgggctcttaatgacgttgatctaacaaacccaccctgagaccagtctacctcttgacttatttatcacattcaaatgataatatctattaatcattgacactaggttgatagtcttttctattttttgattaacgtgaaaagctacagattaattttataaatatctgtcacccctgagataatattaagaacaagtgtcattttcttgagtctttcctctgattgagtttttcctgcttttttaaactttaatttctcacccttcttttcaactctataaacttattttctgtataatacctagaagctacctgacttcttaccagatattatcttaaaccccttcgttctaccttatctatgatgagcaagatagaggaaggtgctcaaggttaggggaaaaactgaaatgttttcaacattagccttgaccaggctcatgtcttagcacatgagggtttgtgcagggaaactgaagcaaaggaaggacagcatggttactctttttccagtcccctttgaaccccgttaccaagtgaatcttcctaaaacactccctatagcacatctttctcctggtcaggaaaacctaaggatttcactgagcctgccagataagatttcaacagttttcttagcatgcagcaactttcacaatctacacccaacttccctttccagctggaccccctctacttatctcgaaccccacatttttgccagttgggtctgtctattcactttaacttttcatacccattcatgctcctggtcctggttattgtggtcccggacctggaatgatccctaaccaaattccatgtattctctaagcctctgctattcagtaggtaaccacgatgggtagactggccttttcactgaatttttaatttaaatccatttgaatttaaaaatagatacttaaaaattaaaaacttttgctttgtgaaagaccctgttaagaagatgaaaacgatgagccaccaactggaagaaaatatttgcaaatcatatgtaaaagatttatctatagaatatataaagagttctctaaagtcaacagtgagaaaacaatctgatttttaaatgggccaaagagttgaacagacatttcactaaagaagatagacagttggcaaataagcacatgaaagatactcagcatcactagctatcaggggaatgtaagttaaaatcaccaagacagatcacttataaacctattagaatagctaaaataaaaaatactaataataccaaacactggcatggatgcagggaaactggatctctcagacatcgctggtggcaatgttaaacagtacagccactctgggcatctggcagtttcttaaaaagttaaacacacatttactatacaactgaacaacagtacctctgggcatttatcctaggcaggtaaaatcttatattcacacaaaaactgttcacaaatgtatgtgtaatagccaaaaaccggaaatgacccaaatgctcttcaaaaggtgaatagttgaacacacaaccatatagtagaatactattcagcaataaaaaagaaacaaactactgatacatgaaacagctagggtggatcttaagaacattatgatggccaggcgtggtggctcacacctgtaatcccagcactttgggaggccaaagcgggcagatcacctgaggtcgggagttcaagaccagtctgaccaacatggagaagccccatctctactaaaaatacaaaattagctgggcatggtggcgcatgcctgtaatcccaactacttgggaggctgaggcaggagaatcacttgaacccggaaggcggaagttgcagtgagccgagatcgtgccattgcactccagcctgggcaacaagagtgaaactccatctcaaaaaaaaaaaaaaaaaaagaacattatgacaagtgacaaaagccagtctcgaaggattacacattgtatgatctcatttacacaacattcttaaaatgacaaagttgcagagaaaacagataaatgaaatggctgccaaaggttagggaagaggagggagagcctaactataacagagcagcactaggagatcatttgtgtgatggaacagtcctgtatgttggttgtgattgtgcttaaacaattctgtacatgtgataaaacgttatagaaatatacacagagacagataaaacatttgaatacatataaataacagtgaaatatgcatgaggtgtagttaattgtaccaatcaatatccttgttttgataatgaactatagttatgtaaaacgttaccatgggttgatggattcatgggatctgtttatactacttttactccttatgagtctgtaattatttcaaaattaaaaattaaaaaaagatactcaattctattatgggaaaatttttaagcatgtttgatatatgaatctgtttctccattgtaaatgttattaaatctaagacgtgctacaagtgtaaagtatatactggattttgaagacttagtatgaaaaacattgtaaaatacttcgcttatagtttttatattgattaaaatactctatattgaattaagtaaaatatattattaaaattattttcaaccttaaaaatgtttaaaaatgtgtcttttagataatttaaaattacatatgtgattcatattatatttctatttcctgctctaagcaaagaatatggtaccctgaaaattgacacatatgttaatgggcatatgcatatgagcaattattacctaagagacaatatccatttttttttacaatcttattaaggtataactggcatacaataagctaaatataaagtatacaatttgatcagtttcagctatgtatgaacccatgaaacccatcatcacaagataacaaacattctcattgcccccaaaagtttcctccctcctgccatctctgtcaccaggcaattgctgatcagctttccattactatagattagcttgcatttttaaaatttttaaataaatacaattatattaattggtatctttcactttgtgtagttactttaagattcatctatgttatgcatatcaatagttcactccttttcattgctgaattcattgctgaattggactgaaatatatttgtccatttacttgttcaaggacatctgggttgttcccagcttttgactattacaaataaagctgctgttaacattcgtggacaagtccttatgtggacatatgctttcgtttctcttgggtaaatacctaggttgacacatatagtagagaatgtttaacttttcaagctataaaattgttctcaaaagtgttgtgccattttccattcccaccagcagtgcatgagagttttagttgctccatatccttcccaacacttattgtgtctttttgattattgccatcatgctaggtgtcaactcaccgtgatttaaacttgaattttcctaatgactaatgatgtccagcatctttttatgtgcttatttcctgtttgtacagtttcttttttgtaaaatgtctatttgatttttgcacagtattttaattaggttgtttctcttcttattaagttgtaagggtttattttatataaaatgcaaacccttcataaaatatatattttgcagataattttgcccagattttggcttgccttttcatttcctctttttcatttcatttcatttttttgaagagcaaaagtgttcaattttggccaggcacagtggctaacacctataattccagcacttcggggggctgaggcgggcagatcatttgaactcagaagagaccagcctgagcaacatggcaaaaccccatctctactaaaaatacaaaaattagccacgcgtggtggcatatgcctgtaatcccagcatccctggtggctgaggcaggagaatcacttgaacctgggaggcggaggttgcagtgagccgagatctcaccactgcactccagcctgggtgacagagcaagacctgtctcaaaaaaaaaaaaaaaaaaaaaacaaagattattatttcttcacccagtttccctttgaaagaggtcaactgatatatatgtgtgggtctgtttctaaactttctagagtgttccattgatctttgtatatctatcattatgataataccacactgtcttgattaccatagctccatgataaaccctaaatataaactcaagtgtatagtgtgagttctacaactttattctttttcagatgtttttgactattctacatcttttgaacttccatataaattttagaatcagtttgtcaatttctaaaaaacaagcctgctgatttttttattggcattgcatttaatctaaagatcaatgtggggagaatagatatctaaataatatagtttttgatttatgggcatgtatatctcatcttttcaattatctcaacaatgttttatggtttttgatataaaggtcttgcataagttttcttcaaaccaatacttaagttcatattttctgctattttaaatggtatttttattgcaattttggattgatctttactactgtatagaaacaaaattgatttttatatattactctttatcctttaaccttgctaaactcactgaatagttccaatatttttgtgtgtgtaggtttcttagattttttttaaatcacctatactggttcaaagaattttccacagtcatgttgtctgttaatagagactgctttatgcctttctttttaacctgtatgcctttgttatttctttttctttcattaatacatttgccataatctttgttacaatgacaagtagaagtgatagaatggatatacttgcactgttcttaaatgaaaagcattcagtctttcaccattaggtgaggtgttaactgtaggcttttcatagctgccctttatgtggttgaattttcttcttttcttttttaaattttttcatcatgaatagatgttgaatttttgtcatatgcttttctgcatatattgaggtgaccatatggtgtttctttttaagtgtattaatatggtgaattacatgggttgattttcaaatgttaaaccaaccttgcattcttgagataaaccttttatttggtaaaatttataaacagtgtttgtcactatgttcacaggggacatgatttgtagattttcttttcttgtaatatctttggttttggtatcaaggtaatgctggcttcatagattgagttgcaaagtgggtttttgtttgtctgtttgtttttagacagggtctcactctatgcctaggctggagtgcagtggtgcaatatcagctcactgtagccttgatttcctgggctcaagtgaccctcctgcctcaccctcccaagtagctaggaccacgggtgtgtgccaccacatccagtttttttttgtttttgtttttgtagaggtggggtctcactatgttgaccaggctagtctcaaactcctggcctcaatcctcccatctcaacctctcagaatgctgggattagaggcatgagccactgcgcccaacatggatagcaaagtgttttatcctctttgattttcttgaagttttgtgtagaattgatattctttctgatttaagtgtctggtagaattaaccagagaagccatcttggcttgatgtgttttctgggtttttgtttgtttgttcgtttgtttgttttatggggaggtttctaactataatagctttatagttagaagcctttaataactttaatagctattgagctatccaggtaatctatgtcttcttgagtgatctctggcaggtggtttctttcaaagaatttgtccattttatctaagttgtcaaatattatggcaaaaaagatggttgtaatattttcttatacttttagtatctacaactgtattggtatcctctctctcatttctataattaataatttgtatcatttctatttttttcttgatgaatccagctaaaggtttatcactcactgatctcaaaaaaccagttttttattccaatgatattctctattttttgtttttctatttcctgtaccttcttgaacatttgaaacatatttataatagttcttttaatgtccttgactactagttctactatctgtgtcatttttgttctgtttccattgactgatttttctccacaatataagatatatttctatgcttttttgcatgcatagagtacatatactgtatatgtacaagttaaagaataataacaaagtgaacaatgtttacaactccaaacaacttgacgaaaagaatattatcaataccttaaatctgtccctggtaacatccctaccttgatacactcaaagtgtactcaaaggtacaatatcttgaattttgtgttaaactaacttttaattatttatttttgcttaagtatgtaatcctaaaataatatattaattttaacttttttagacctttgtcaaatacaataattctaggcttacttttttcattcaatatgtttctgaaattcaaccagatgaacatgtatctgttcattcatattctatcctaaatggtatttcattaaatgaatattcaaaaaattatccactatctgcggacatgagagctatttccagtttttctttttgcttgtttgattcgctggtacaaacagtgcttctatgaccatatttgaatatgtctttggtgcacatatgcaaaactatttctaaagtatgtatcttagagtggtattgctgagtcgaagactatatgaattttcaactttgctaaataacactaaattgttttttaaagtagtggtaccaatttactcttcagtcaaaagtgtgtaagtgtttttattgctctacatcttcaccaatatttggttttgtcagactatatagttttgccaatctgatagaaaaaaactggcatctgtgaaagtcatttgttttccctaaacatttccagttttctctgcttccaagcacatagtagaaggaattgcacttcctaaatccttgttatgagtgagtttgacttgtaatgaattgtgaaggaatgtctgccagctcctggctggagcaattacttactgatgcaaaaacccccatgctttccttccctctgacaaggaggcctacaacatcggaggtaactgttgtgtgaccctgggaacatgagtgatcataatgaacagatgactgaccacagttcccagatgacctaaactggacatttgtgtgagtgagaagtaaaattttgttggtatgattcttgggtgttggtggcaacaatattacctagcatatcataacatacagaatatctcattgtggttttaatttgctttttcctgcttactaatgagactgcacatcttctgacgtttggtctgggcatttttttatttcataaaatgtcggtttatttgtttgtttaaaccatctttcaatgggtttctttgtctttctcttattgatttctagaagttctttagacattttggattctcatcttgtgtcagctttgtttcaattccattacacaatttttggtttttcttttaatggttcttaaataaaactttttatcttagaaaatttcaagcatacaaaatagaatattctaataagcctccatgtagccatacccagcttctataattatggactcatagtcaatcttttttgcatctgtaatctctacccattcctcccacccctggattattttgaagaaaatgccagacatcctatagtttcatctgtgtatctctaaaggtaagaactctttgcaatttggaggtccagtgttatgtgagggtctctgttccaatcccccaacctgtataggctgaaagctttccctcttccccctcaaacctcagctgtaggcttccagggagagtttgtgtctcagctaatcagatggctaaacacacttaaaaactatttttccattatattatgctaaaagcactagaagtaatttagtttagcatgtattcatgttgtttagacatgtactactaagtatgtattatgtgtgcatgatttttacatatgcgtgtttaccactatccatttaatctataagcttctaagaggtatgaactatttctattcgccatgttttaagtaatacccagcccaatgtgattcaaaagtaaatgtataataaattctatttgatgaaaatggaagtcctggttattagaatatcatgaggaaaatggactcaaattgtggtttgattttcataggcaattctaatggatatataagaaatttatctcccatagaataaaacatggaattttccccattttattcatttcagttttctttctttcatacctattctaggtggtctatgcattgtatattcagtactgtttttgaaaggcatgttactcaaaatacatggttgtactacgaataaatgcactatgctgatattaccattgtagaagattctgggaagaacattctattattcaatcccttaaaatatatcatcctattgagttgcttcttctaaggcattcatgtacagtgtgctcttttagagtttaacaattccattttcatacccctctaaacacaccattttaattatttttaaaaacttaccattagtgatttgtcctattttgtttttatataaatgtttatatacaataatgttatgttaaaaataaatacaactgttttgttattgttatattatctttcacttaaacaagaggaaagggagattaagtagctgacggtgtactgaagagtaactgaaaagaccaaaacaggaccattggctttttctacctattcttctttggcttctgccttttcatgtcctatgtatggctgccatcatgtgctgctctgtcttttcttctcagggcctgcttgacacatttgatccagaaaagcttcttcctcccttctgaccactgtttgctcagtcagagctggtgtgcctatagaccttcacatccttattccatggctacctggcagggataagatgtatatatatatatacacacatatatataagtatatatacgtgtgtgtgtgtgtgtgtgtatatatatatgtatatacaggttgctgctctgttgctcaggctggggtgcagtggcgccatcatagctcattgcagccttgaacccctgggctcaagtgatcctcctgcctctgcctcctaaagcactggagttacaggtgtgagtaccatgcccagctgtggtgtccttttgatccttgtatttggccttcttgactaatccagtgctcccagacttctagcagaagcccattctctggaggtaaactgacaggaatcctatggggtggagggggattccctgagctcttaaacatggtcctaaggtgcttccttggctactttatgtttaacaatagattgctggtgatactgatgaaactcttcttttgttttaatatctgacaaatttcttgctaatcttaattactagagcaactctagggaacagtgaatcttcaaacacaagattttaatatgctttccttcatgtcagtgttccttttatgcatacctctagtaaaacattgttccatttgatgccaaagatttgccctttctttaattaattttgaatactgcacatgttagattttcccccattattcatattttctccaattgttcatctggggacgaatttaagtaatttgtacatgtccttagtttaaaatgggttttgtacattcactgaatattttgaagaaaaatcaaccattacatgacaaatgtatgtcttctagaatttttatttctaaacttcatggaacacttctgtgtgactttctgtaatatctaatctcaggcaaaaatgacttactgtattagtctgttttcacactgctgataaagacgtactcgcgactgggcaatttacaaaagaaagaggtttaattggacttatagttccatatggctggtgggggggcctcacaatcatggcggaaggcgaggaggagcaagtcacatcttatgtggatggctgcaggtaaagagagagcttgtgcaggaaaacttccccttatagcaactatcagatctcgtgagacttactcactatcacaagaaaaacatgggaaagacctgcccccatgcttcaattacctcccacggggtccctcccacaacatgtcggaattcaagatgagattagtgtggggacacagccaaaccatatcacttacacttctctatgactcagctgatttattaaaaaacgactttatgagatgtgtcaattgagatggaaggtgctggacataatgaactgccggtttccccccagttctgactcttgcctgcagagccctaacattgcttacatacgcactgctctttcacatgaaggaacagcgcagacatcacctaatacgcgtcctactgtattctttctgccacattcccagaaaccccaaagctctttggaacacccaggggatttcacaggtctataaagaagaacaacctgtaaactgggcttggtgattctgtggggatacaaaccaacataatacatatgtaatggaataaacaacggcattagccagttcagagtcttcaagctgaacttgttagaaggagcgccacacctcaagtaaactaatagggtggggatcccagacggagaggattctacccagaatcctcctcaattcagccccgagctttctttgaagggctttctttgtacagagtttaaggtcagagacttttaacgtggaccggaaagacaaactctaataccttaaggggcactattaaatcaaattccacaaactaaatacttgtccggagatgaacaattcagagtatagcagttgttgcaggctaaatccaagcatatgacataatttagaaatctaccagtgtgtctccagagaatgcattttcatttttccataatataatacatgcctatcaaatccatctaacattattgaatccatcactttttaagaaatgaagttgttgtagctgaagctttcaagcatgccgtcacatatagttcttacaaatggacttacgaactgatttggagggaagcccccaattcccatatgtttgactttaaagaacaatccagctgtatctgaagtaattgtcctcctcaacagagtgcacaatgcagggtgcagtgggtggtacacaggagaaaaaactcatggaatggtggagacagccccctagtcagccagatgggccaaatcagatgtagggtcagcagtatcacgtttatacgcttggattacattgccacctagaaggaacccagggagtacctaggtttccatatatggggggattcctgcaatgattcagtcctttaatggggcatcttactgtaaatcattaaaacagcaccacctactctccagcatccggcccactgagttcttgaaagcatggttgctgtgggcatcacagctgatttctgttagttgactggtctcatccagttgaccaacattctgcttcaggaacattgtgacttctacacctaggctcacccttggttatgatagcatcagtgtctaaagttttcttaatatgctgtaacaataatctctgtctcatctatcatcatattgccacccatttatcatccaaaaaaaattattaaaaataaccaagccttcagattcaggaaaaccattggaatcaatttgatttcccttgcagttgggaaatgaattttaaattattcatgttaacaccctccagataaattgaatttttagaatatttaagaaaagcttagtaaagtccatctttgacattaacagattcctttttttaaatattaatttcatattaaccattgctttttgacatacagtcatctgaccaacgatttcaagaatcattaatgttaattgggaaagaagtaaaaccttaacattttaatattataaaactttttttttcaacttctgtttccagctgtatgactcactagatatctggagaagcttttctgccacttaaaaatgctggataaggccgagtgtggtagctcaccagcgttttgggaggccgaggtgggtggatcacctgaggttaggagtttgagaccagcgtggccagtatggcaaaaacctgtttctactaaaaatacaaaaattagctgggcatggtggtgggtgcctgtaatcccagccactcaggagcctggggaaggagaatcgcttgaacccaggaggcagaggttgcagtgagctgagattgcgccaatgtactccagcctgggtgacagagcaagactctgtatcaaaaaaaaaaaaaaaaagctggatgagatagtttttaaaaaaacatttttaaaaatgcacacctaagcttataggaaagtcaaggaaatcttctaaggccagaaagctaagcaggaacccagaggaaaaaaagccctgtagctggcattgccctgaatgcatctgccaggtgctggtagcctcgagtgggggcctaactttctgcagccatataatttatcctccagcccacagtgattatgaagtgaaaggtggtgctattaataatacatgaggatttctgctcctgcttggaatatagaaagctacgagagaatgtcacccccatcctaacaacaagaaaatgaggaacagtgtacaatattataactttctttccttaaactcatcagagacttgaggtcacaaggcaaccaggaaagtaaacttcaaaggataaaaagcatctctaatgagaggcaggatatgaaattgttgcacctttggcagagtatgggaggaaggagggggttgttgccatggagtgagtaagaagaaatatttttttaaaaataatgaattccttactttggcaggctgaggcgggcagatcacttgaggtcaggtgcccggcctgtccaacatggtgaaaccctgtctctaccaaaaaaaaaaaaaaaaattagtcgagtgtggtggttcatgcctgtaatcccatgtaattccatcttacttggggggctgaggcactagaattacttggacctgggaggtggaggctgcagtgagctgagatcacaccactgcactccagcctgggtgacagagggagactgactcaaaaaaaaaaaaaagaatttctaaagactgagtatgcactcatatctcatattaatttagaataattgagaggcccagacacaagcggagttcacacacactcccaagcttctcttcatagtctccatggggaagagggggtgctcttgaggaagactagggcagggcaaaaggctggagagacccccccgtttggtggcacaggatgcaggaggaggtggctgcccccacaccttgatgctcctctcatgggagcaaaagccttaattaagctgtcaggaagaagcagcaagcccttgagaagcaaagccctctgcctctggaggggggccagcaatcccgtctttccatattttggtatgcaggcacatatctgcttctggggaaaggacagaagcaaaagtcatcagtccctgaggagagacagtaaagcttttcgaggcctggaggctacaccagtacatagccaaggtctgcttctcccccaagagggacaggaacctgtccagacaagggacaggttgctcagctgattagccatgggggcacaaagcaggatggaacatggtagagtggatttggaaggggcagaaagaaaatacccaacacaatgattaaacaattttgagagtccaggtgcagtgactcacgcctgtaatccagcactttgggaggccgacttgggcggatcacctgaggtcaggagttcgagatcagcctggccaacatggtgaaaccccatctatgctaaagatacaaaattagctgggcacggtggcacacacctgtaatcccagctacttgggaggctgaggcagaagcattgcttgaacccaagaggtggaggttgcagtgagccaagattgtgccatcgcactccagcctgggcaaaaaagagcaaaactccatctaaaaaaaaaaaaaaaagaatttttagagagatacaggaacaagaagctagaagagagagagacacaaaataaacaaaattctataaatgaaaaatataaaaattgtattcatctcagttgataagcagcagattagataatgatatggtttggctgtgtccacacccaaatctcatcttgaattgtagctcccataattcccatatgttgtggcagggacccagtgggagatgattcaatctttggagtgcttcccccatactgttctcatggcagtgaataagtctcatgagatgtgatgatttctttttctttttcctttttttttttttgagacggggcctctctctgtcacccaggctggagtgtagtggcacgatctctgctcactgcagtctctgactcctgggttcaagtgattctcctgcctcagccccctcagtagctgggattacaggcgcatgccaccacgcctgactaattttttgtattttcagtagagagggggtttcaccatattggcaaggctggtctcaaactccagacttcgggttttctgcccgcctcggcctcccaaagtgctgggattacaggtatgagccaccatgcctggctgagagctgatgattttataaggcatttcccctttcacttggctctcatactctcttgcctgccgccatgtaagacattccttgctcttccaccatgattgtgaggcctccccagccgtatggaactgagtcaatttttcctcttatctttgtagattaccaatcttgagtatgcctttattagcagcatgagaacagactaacacagataaattgattgatagccaacgggaaggagagtagtagaagataagttacccaagcggagcacagggaaaaaaacaaaacaaaaaaacagtgaaaaatatgaaagaagggttaggaagtattgagtgagaaagtctaacatgtctaattcactgacattttaggacagattaggcaatattcaaagagatcatgactattttccataattgaaaaaaagaccagacgggcgcggtggctcatgcctgtaatcccagcactttgggaggccgaggcgggaagatcacaaggtcaggagatcaagaccatcctgactaacacggtgaaaccccgtctctactaaaaatacaaaaaattagccaggcgtggtggtgggcgcctgtagtcccagctactcgggaggctgaggcaggagaatggtgtgaacctgggaggcggagcttacagtgagccaagatcgcgccactgcactccagcctaggcgacagagcaagactccgtctcaagaaaaaaaaaacagataaaagaaaaaaaagaccatgactatttatttattctgactacaaagatccagaagagaagtcaagaaggccaataggtcctgagcaggataaataaaaataaagtcacatttagatacactgtaggaaagcttcagattcccccaaacagagaggaaaaagaaaaaaaaatgccaaaaagaaataataactagattaatagtggacttcttattggcaggaaaacatgtcagaacacaatgggtatgtcttcattagcagtatgtctcttcaaattgctgaaggaaattaactgtcagcttgaatcctatacaaatctaactttgattccaaaggaaagacaaagtaaagacatttatagacaaaaattgaaagggattactactaagacacccttacaaagaagctttaaaagggtattttttaggaagaaaaaagaatacagaaggaagatctaatatacaagaaagaattttgagccaagaaaatgggaaacttctgtttaaacctaaattaacgttgacagtataaaacaacaaataatggctaacttctggtgtttaaaaaacgagattgagctgaaatactagaaggaagagcatataaataggaagccaggaaggaaagggaaagcaacctcttgctctttcatcattggtcagaatggtaagaatatggataaacattaggcttcgttagcttatatgttaaaatgcctaggttaacttctaaatgaatagaaacagtgtttataacttccaaataaatacagagaaaatgggaatgaaaaaaaatcatttaatacaaaagaaagcaagaaagagaggggaaaaaatatagatggaagaggcaaatataaaatagttatctccttaagataaaatatttttagtttagtgaacattgtcttctagcacagagacactaaaaaatttactcactgggaaacttattcctttctaatcttcagattgcttaaagtaatttatacctatataggagatctttttcttttttctttctttttttgttttattttgttttgttttgttttgttttgttttgttttgagacagagtctcactctgtcatccaggctggagtgcagtggtgctatctctgctcactgcaacctctgcctcccgggttcaagcaattctcctgccgcaatctcctgagtagctgggattacaggtgcacaccacaatgctgggctaatttttgtatttttagtagagatggggtttcaccatgttggccagcctggtctcaaactcctgacctcaagtcatctgcctgccttggcctcccacagtgctgggattacaggcatgacccaccgtgcctggccccctcacttttttttttttaatttactggcttttcctctgtcccctcattttttctctctctcttttccttcttccatctgtttatctatctgtccatctattaatatctacctatttatctatctgtccatccatccatctgtgcagtcatccatccatccatccactttaccagctataccccaaccctctttacttctaaacacctacccatctcattatgctcccacctatctatctgttctttcattcattcactttataaccaaaatctttttttccaacccagacctctctccaaaccttgctacttgacatctccttagacatttcataggtgcctcaaacttcacatgtccgaaacacaaccctcggttccatccccacacaaagttccccctccccaagccctcaccatcacagcaagtggcaccaccagccatttaactgctcagctaaaaacctaggagtcaccttgatgattgtttatctcatgcctcacattccatcatcagcaagtgttgtcagattctaccctaagtctgatggtgtcttgccatctccactgctactatcctctgtccacaccatcagcctttctttgaaaccactggaatagtcacatagccaccgtgcaccctgctcttcttactatccttttccatagctgccaaagtgatcttttcagtatgaatcagaacatgttatccccttcctaaaagcttctgtggcttcccattgtgtctagaaataaacagaaagtctccactatgacccacgtggctgctaggatctgacatctactcagcctctgacctggtcttcctctgcgtgcggtttcattcctttgacgccagctccactggccgcctttcctgttcctctaacatgcccagctcgtgtctgactcagccctttaaatctgctgttccctcctccagacctgcaagatcaagtctctgctgaaatgtcacatcctccgagagacgttgcctgacatgctgttttatgttcatctgaacacatttttcagcatttgaagttatctttttaaaaaaagcagttcattgtctgtgcctcttaagggcagggactttgtttattgttatattctcagggtctatacctatgcctggatcatagtaggggctcagttattgtttgttgaatgactgtttggcattaattaattaatttcacaacttggagtggaattagccatctgcattcatatgaaaaatgacttaaatccctatgatatatcaaattaaggcaaataatcagccaataaaaatgggtttgccacaaatttgaccaatcaaaggttaactactatgtaaagagttattacaaactaataaaaagaacactaacacaccatttaagggacattatagtccaggcaggaccccacctaccagagctaaccagcatttgcacctcctcagttatggttttgaggtctcctgcctccttaggattataggggacccagcatctctcttggtgtcagaaaacaggaggtgatcctccaatatcatgctgacacacttacagtcctcatggaccctttgaaaacagcccctccattttctttttgccaagcttgggcataaggcttatttgtgttaggccatgctgccatcttgggagaacccttcagaaggctccatcccctcacacagcactgcatgagagtgggcatgggatgccatccttaagaaccaccccatcccacgccaagtcatgaggaagagtgctcccttcactctttgctagatcagttctgccttccttcccacacagtgtcagccttcttcagtcagccttgttgaagaaaagactccagaatgctctgcacagaaactcaggctgaagttttgcagtctgagaattttttgaccactctcagatgctagaaaatccaggaacccagactcaacacaaattcttcaggagtgagaaggaaagattctgatacttgtcctaagtcttcttcataagcaagaacaaggcagatgttagtaacacaaatgattattttgctatatatcctttgccaaatagaattactctgatatatgtaaataaatattctcctttttctaagtagagaaaccatcaataattaccaggttttttatttctcaaattacaaaatacttaatagctattctattttatatcaatgcaaaacacgggtaagaactggacatttgtggaggggctatatagcatttatgaggttcatttgttttcttatgctttgcaaaactgagttagtgcatgtgaggatttatttattattgcaagcaaatcaacttaagtattacaaacaaaaaatctggtcactgttattttgaaagcattaagataacttacattgctaagcattctattgatcttttgctatttgtcttgtattttcaaatgattatatttccctgcagacagtggaaatatcaatgagaaataagatgtcctttcatcaatgatgtaggttatttcatttccaaatattcacatattatgcttacatgtgtttcattcttaatattccgaagtcaatctgttccccaatagtttttttattagaaaggaaaatatttcacatcaaacattttaataatattgtgaatcaaatttagaatatttttaaaatgtgataacgtaccaatagtgacatctaggccgggtgtggtggctcacgcctgtaatcccagcactttgggaagctgaggcgggcagatcacaaggtcaggacagattgagaccgtcctgactaacacggtgaaaccctatctctactaaaaatacaaaaaattagccaggcgtggtggcacatgcctgtagtcccagctactcaggaggctgaggcaggagaatcacttgaacctaggaggcggaggttgcagtgagccgagatcgcgccactgcactgggcgacagagcgacagagcgacagagcaacagagcaagactccatctcaaaaaaaaaaaagtcatctaaattgatataaaaatgacttaaatctgtataaatcaaattaaggcaaatgatgagccaataaaaatacctttggcacaaatttgaccaattaaaagttattataattactatgtaaagagttattacaaactaataagaagaacactaacacactaattaaggggcactagagtccagtgattaagagctcaggctctggagttagagctgggttcaaatccaggccctgtcacattctgtgtgatgttggacaagactcgtatcatccgtatacctcttggagttctaatttgtaatatggagataataagcatgactgcttgcagtgtaattgaaaagagtacgtaagatcatacataaacaactcttggtaccaatcactggtacccagtacttactattattttgccaaaagagatgaataggcagtttgcaaaagaagaaatacaaatgactagtagacataagcaaaaagttaatctccctagtaatcagttagatacaaatgaatacagcaatgggaggccattttttcctagggaatttgtgttttaaaatatattctaattctcagtcatgatatatgtggtgagttctggaatgaatataaattcagacaatttttccagaaggcagcttggcaatttttatctagtgctttaaacattttcatagcctttgaccaaggcttcagctattgctctactccagcaggcgttactcacattgtagtttgaactggggctcctggcagcaacatttatatagaatatactgtgtttggtggctcctagggttgtgcagctggtgcccatgccactgacgtgttcaacttacagcaatcaagcctaagaaaataaacagaaaggcacatatagatttatgtgtaaggaagtttgtccaagagtaattcagaaaaagccaaaaactgtgaaacaacctaaatttcaatcaatggaggaataacaacatgaattattgtagattaatagaaaggaattttatattgccattaaaagtcacattaggaatctataagacataggaaataattgtacaagttcattccaaaaggaaagtagctttattatggcctccaactagaaaagtaaaatgtattcattttaaaaattacacaatctagaaaaactaaataaagtagacactaatgatcttaacattccaaaatagacacttttttatataggtcctaacaaactttttttccacatgaatgttcatattgctatgtaatgtaaactgcaaaaatcaggctgctaaactgctaattcctaagggggggaaaagtacctaagtatttattcatggtggagggaatatggatgatttctttttttgttttacttatctcttttttgcctctaacatatctacagtaagcatggattactttataagcaaaacatcttaaataacataaatgctgtaaatgactttttcttacttaaattataactatttctttcagtgctctgaaagatggaatattttttaaaaagacaatattccttttgcaaaatgagaactaacactcattaatcactctgctgtcttcctcttaatgaaaacctgcaaatgcatatgcaaatgaactgaacttctattataagatggtgacaggatgctctacagaagagaaggtaatgatagagtttgaaaaataggagcgcagaggaaggttagcagtggtggaatctttctattcaatgccttaaaagagttgtattaatctgatagtgttccacctaccaataatgaaataagatcataagcagcagtaaaaagcaaaagctcctcattgtgatatgacacatagagtgtagcagaatagggctatggggacccagatcaaaaagaaaacgtagaaagttgtaatattcttcagacattttcataagtcctgccagatcatcctatttaactacttgacaagtttagtctgtattacccacgttaagcctcctagagtatttttatccaatatcacacatttggatcaaaactttaaaatatcaattcaacgttcaaatactttgtctacacaattacgtacactcatgtctaaaaatacaaattgagtaaacccaatgtccctcaagattgttagcattcagcagacaaagatttaatgtcaaaagagggtctgaagcattaaggttcttaaatataactgtcccaaggagaattggaggtaggcttataggaaattaaattccttggacagggtagatgagagtagagacagcatcctattgtgttaatcccgtttttgcccttttgtgtggaaaatcatgacagcctgctgcctttaaatggcttgagaatccagaacaaagataaacactcagctggattctacatttttgaaattctattacaggaaagattcttgggttaaagaagggatatatgaaaacagcagagcaccattgctgccctccagaatcttcccattatatgagacaggtacgaaggcaactggaaaacatggcagacttttttttttttttttttttgaaacggagtttcgcttttgttgcctaggctggagtgcaacggcgcaatcttggctcattgtaacctccgcctcccaggttcaagcgattctcctgcctcagcctcctgagtagctggggttacaggcatatgccaacatgactggctaattttgtattttcagtagagacagggtttctccatgttggtcaggctggtctcgaactcccgatctcaggtgatctgcctgccttggcctcccaaagtgctgggattataggtgtgagccaccgtgcctagcctttttttttttgagacagggtcttgctctgttgcccaggctggagtgaggtggcatgatctcggctcactgcaacttttgtctcttgggttcaaacaattctcttgcctcagcctcccaagtagctgggtttacaagtgtgtgccaccacacctggctaacttttgtatttttagtagagacagggtttcaccatgttggccaggctggtctcaaacttctggcctcaagtggtctgccggtcttggcctcccaaagtactaggattacaggtgtgagccaccacacctggcccagaattttttaagtgctgaattggtggcattctctagagaaagagaaccaataagagagatatatagaagatatatgtataggatatatgatatatgtagattagatatagattaataggagatacatatgcagtcagctctctatatttgtagattccacacccatgcattcaaccaaccaaaaatgttagaaaaaacaataaaaattacaaacaacaattaaaaatgatacaaataaaaaacaatggggcataacaacgagttacatagcatttacatagtataggtattgtaagtaatctagacatgattcaaagtatacaggaggctatgcataggttatctgcaaatactacactattttatataagacacttgggcatatgcagattttgatatctgagtgggggttctggatccaatctcccatggataccaaaggactactaactgtacagaagatacagatagatgatagatagatagatagatagatagatagatagatagatagatagataaaagagatatttatagaagaaatatatataggagatatacatatacaatctatatataagatatatagtggatatatatgatatatatatttaggaatattatatatggtatatctcatatctcatacatctatgtatctcatatatatatttatatgagaaaatatatgactgtatgagatatacagataagagagatttagtatatgcaattggctcactgattacggagtgagtcccagatctgcaggatgacttggcatgtaagagacccaggagagctgatggtatagttcctgtcaagacagcaggctggaaccccaggaagagccaatgtttccgtttggatctgaaggcaggaaaacagctgatgatcagtccaaaggccatcacaagagttttctcttactctcaagggagggtcagcctttctgttttctccaggccttcaactgatgtgatggggcccatctacatactgggggaaaatctgtgttactcagtgttctgatttaaatttaacttcattcaaagacacacagaaacacccagaaataatgtttgaccacatacctgggcaccccacagcccaatcaagttgacgcataaaattaagcatcacacctgagttaaccactgtaaacattgtggttgacttaattattcaccctttcaatgccagccctgaggaatgggagtttatgtggataaggacaaaaatctttgggcataaagagtcagctaaaatactttcgcctctctgttgctgccaccattgagagtagatgtctctaagtgcatttgtctgtgataccccctctttctgtccaagctgagggttttattttcatatattcagaacacctaagaagttgtgagatattttttctccaaaccaatttttctagctgtggtgtgaagtatttctcaggcataaacatcacctttcaaccccatctgaactgaaaatcccatttctaatcttctttatgattgagaaatgatagagtagatttgctggaaaacatctgcctcactgacagctggctgttcttgtgggagtgaccctaagtgcctattgtttatgcttattcattgagaagtgtcttttaaagatcataacatggaccaaaatttgaagaagaattgccccacattgactgagaaaatgtcatgctaatgttagattttattctattttctcatatcatgatgtctgtggttacacgctcttgataagaatttgattccctctctttccttcatgaccagagacaatcccggcaaaaacatggagcaacattagctcttaccatttccagtcaagctcttcaacaatataatctgttctctgaatctcatttctcttatcaaaccttagcagcatatcaaaatcacctgggaattaaaaaaaaaaaggctgatatttggtttctaccttctgccaccctcagattctgatttgtttattctggagcgtgatctcggcattgggatttctaaaagccttctgagtgattctcatatataccccgagttgcaaaccatcgccctaggacctttattattcaaaattattcacatcacctccaagcttgttggaaattcaggggcctgcccctggatgtgaatctgcattttagcaagaccaatatgtagatatattaaaggttgcacagccctgtcctatgtgttggtccctccttgcaattaaatttagcttttagggatagggaaactcgcccatgtgaaaatcgttatttaattccttcagttccccagaggtgatcaaattatggcagatgctcactgtattgtttgagtaagtttaagaagtaaaagttctaactatggaactctgagcaactggaagttgaacaggatggagtttttgattagggaataattttgatcccttgaaattcctgcactcaggcaaatgacttcttagtcttcctatactgtgcctgtccttgccagggcccttggggtcaggagtacaagtcctatgagttccccagagcctggcctgccccaaagtttatgttttaggcaaaaaaaaaatgacagtatcatcataggttcaaattgaaaaacataagtaggccatgcgtgttggctcacgcctgtaccagcactttgggaggccagggtggatagattacctgggcccaggagtctgagacaagcctggacaacattgcaaaaccctgtctccactaaaaattttaaaaagcagccacgtgcctgtagtcccagctgcttgggaggctgaggagggaggatggattaagcccaggaggtagaggctgtagcagtgagctgtgatcgtgtcactgtattgcagcctgcgtgacagagatgaaaggaaaggaaaggaaagaaagaaagggaggaaggaaggaagagaggcaggaagggagggagggagagggagagaaggaaggaaaaataaaaataaaaacatgagtattcaagcaaagaacatgtattttaaagacttctcaactgactaaagtctcaaacaggaaaatacttaccataacagcaggctgaaatttcaagtaaaaactaaagggtaattttttttttagtgtgtattggaatgaatcagccaaaggtgggttcaaattaatgcctgtaaccttgataaattacttaccctaattttttgttttcttaaccaaaaagagcagggatgataatatctacagctggagttgttgagcattttaattaagatattatataagttttctagcctcagtttccccaaatggaaaatgaggataacaattctcacttcaggattgttatgggtatatgacaatgtatacaaagtgtttagcatgatcctggcacataggaaatgattacttaaggagagtgacttttctatatcactaatggcagaaagcatggtgagagtggtcataatacctggagcagtagtagtggtcatcaaatgttggtttccactcctttatcttataggggccaaatttggcagagagcttaagtaatctgtctatacttttattgaaatctactttgaaattccaccaggtttctcacccaatgggactgggtggggaaatgtccagatgtaagacattatcatctagtggtgtgtgtgtttgtgtgtctgtgtgtgtgtgtgtgtgtgacaaagagagagacagagagcacttgagtgtactctgttatattatacatgccacttcctaaagattctgatgtatggccaggcacggtggctcacgcctgtaatcccagcactttgggaggccgaggtgggcggatcacctgaggtcaggagtttgagaccagcctagccaacatggagaaaccccgtctctactaaaaatacaaaaattagctgggtgttgtggtgtaatcccacctgtaatcccagctactcgggaggctgaggcaggagaatcgcttgaaccagggaggcagaggttgcaatgagccgagattgcaccattgcactccagcctgggcaacaagagcaagactccctctcaaaaaataaaaataaaaaataaaaaaagatcctgatgtattgtcaacatccactctctccccaggaattaatacacagttaaaaactacctgccgtgcagaatataattgagtgctaataacattattgttgggcatacattcatttacataaatatgaggtatattattatctccattttacctgatgaggagactgtgaatgtgaaaggttatttgtccaagatcaccaaagtatctgtagctaaattaggatttgaactcagatttatcttcaaagcccaggcctggctcctatgtcttaatatactcgcatagaggtgatgtaacaggggggtggtagggagagatgaaaattacttttgcatcagactttaattctcacagattactccagaaaagcagatgtgagcacgctatactttgctctaaggaacagaggccacctagagttcctaactggacttttatgctttagacactatattacatctatcacttcattccatcatcacaaagtctgtaaatagggattattaacccattttagagaccaagaatataagattaaataatttgctcagggtcacacagctaataaatgacaagctaggagtgaagcccaggtctttttgactccataaatacatattaaactttcctagaatcattttctcatgctttgttttacagacaatctggaatatttgtaaaaggccaaaatatgttttctgtatcagaagattggctcagatattgtgtctgttagctttccttcaatgcccatttactctcctttttttattttttttttaaaaaaaagaggatttctgttttgttattgaacgtatagctgctacagggaaagaaatgaaaatattgattcagattttcttggggagtgaaggcagaggacattcagagtacaggatctgctcggttccctgggctgacaagctaaaactgtggataagaaaatgccagctgtctagaaatagtctttgaggcttgattttggacgttttgttaaaaacaacaacaacaacaaaactgctgaaaagaaagtcgtcaccggcatggataatagctataattcccaaacagaaatcatttctatagctattttaaaaatttgtcccagttgaaatgtaaatgtcacaggaaggagtcaaggttgttttgtaggatcccccacagcaaggatatagttttcctcataccttttttttttttttttttgagacagaatctcttgctctgtcgcccaagctggagtacagtggcacaatctcagctcactgcaacctctgcctcctgggttcaagcaattctcctgtctcagcctcccgagtagctgacattacaggcgcacaccatcacgcctggctaatttttatatttttagtagagacggggtttcaccatgttggccaggctggtctcgaactcctgacctcaaatgatctgcccaacctcagcctcccaaagggctgggattacaggtgtgagccaccgcgcccagccagtttccctcatatctttattccccaggcctcgtatactccctggcacataatgagtgtttagtcaacatgactgagtgaattaatgaatgcttgaataaatgaacaggtagtagagaatgaatatattggatatcgttatgaaagcaaattttcatagaaaaagagcataaagccataggaacccccgcagaagacacgaaaaacaaactcactccctgcttttgcccagagcaggcttacagctggcttcactttagtttatcctagatttctcttaggacattgaagacagaaaagatgtttgtaacctgaagtgtcagggaacaaagccagaaggtgcaacatgcagaagaaaacatattcaatgagtttctgaatgctatcctgtttttctcttcaaacagaaagaaaaactctctctctctcggccccccaccccctacactccccttctccctctctgtctttccagtcaaagagactgcagcggatggcatgccttaagtgcctgcatgtgccgatctgatccgcccaagctaagtggccaaataggatactccaggcaatacccccaagcccccctgcagctcagtgagaaagacgatgcaggaatacctgtgcctgcgtcgtgtgccgccactaggggtccccagcagcaggcgatgtgaactgggaattgggtagcagaggcggcctccctttgtctgcaccccaggtgtggactcctctttgttcagaggcagggccgctacctgcggcgtctgagctgcctgctcattaacccatcctgggccgtctgtgcacctcctgaggaaacagcgggtttctcagctcctgcccctagtgacgcctgcctcagaagagccaatgcgttctctttctcaggactaggtgtctttgtatttgaaataaggcttaaactacagagcgaaatatttctcactacagcaaaagagcattttgatgttgagaaattgatggcaaaaggaccactttcagggtacggtagagtacttgccataaaatatttaaagctagttgacgaatagccctgctattctcctgtgaatgcccaccactggattaatcttgaaagtaaggaatacagtatttcattctgtgtttagcacagggaaagggaatgaccttcactaaaaaacactccagaatgcctgcagtgagggagcacagctcctgctatgacagccacgttcaccctgcagtgctttcttgtctgcttttaaacttcaaaagaatggtgaaacaaaataaacaaattacaccaccataagagctaccctgcaaacaataaatcatgtgaattgtaacagccggtgaaggagggtggggtggggattgcaaatatttactccatcaagattttattcttatgtttcaccgtttcagtcttttttgatcacagcaaaggtagtatccttacatgaccgtcaagttctttcttttgctgcagatgtgttgttactcattgtcttgtagctcagtggtcacagctactaacgtggaaaggaactggcatacaagagaaccatttacagatgtccttaatttgctcatttactcaatgagtaaacaattgaacaacatccactgagcacctattgtatgcaaagtatggtagacaatacaggggctgggcaaacaaggatcctgcccccaccatgcttttttttttttccctgagacagggcctcactctgtctcccaggctggggtgcagtggcatcaacagagctcactgcatccttgaacttctggactcaagcaattctcccccctcagcctcccaagtagctaggactacaggttaactacaacgcctggctaatttattttttatgtttttagagatgaggcctcatgttgctcaggatggtctcaaactcctggcctcaagggatcctcccacctcaacttactgagtcactgggattataggcatgagccaccaggccaagcccgctattaatggactaaggtaatgaaatatataccaaaagtaccattaaaataagacagagcatgagatctgcccattgagaggtacagtagatggactagagaaatccaacagaagaagagttattttctgccttgggaatcagggaaaactttccagagaaggtgcattctggttgaacccttttggtatgtaggatgggaagcaggaaggaatggcagaatccagtgctgctagccccaagggcataggccaccatgaaagagggttgcctttgtgaaaggggggaacagagattagattggaaaggtaagtttggaaggctttgaatgccaggtgaaagctaagttaaaacaaaatgataatttttattcttaagaagcccacattatccacaagactccgtttatcccataagtcttttaatatttgaagaaaaaaggcagaaatgtcttttaaaattctactttccaaacaattaagatttctgtagcaccaatattctttccactggcaaataggtattacctagaattaaggcaacacataaatgaataaaatagatgataactttttcattgtttcatttggagaaatactttagaaggtccacaaacaggtccctgagcctaccaaagagggatgttagcattttatttccagcatgtcctgataacttactgatactaaacatttttgcaaggagcagccagccttcaggctcctgaatctaagaaggatgatagtgaatgattattcatgttgagttttctgcattggttatggctttatcaatccagatgatcaatcaactttcagattttagttctgaacctggagctttctgtttggtattcaaaataatgggtgtcaaagttatagctcatatcacaccgacagactgggcctcccccatcagcacttctctgttcagcaagcgtgtttgttggccttgtattcctcttctggccccaggatccaggaaaacatgagtctcagcttttttctacttctgtacagcacagggccttcaggtggtgccttcacagcaaatacccccgtcccttcatctgtcaatttaggacaataaaaataatctgcctcacagagccatgctttactttctccagttaaaacactatgaagggaaatatgagtatccgaactgcagaaacataatctgttgtccttttgtgaaatttcagagatgaataatgaaacctgttaccctattgcacaatttgggacaagaaatataagccatagattgaagataagacatttccccctagtagaacaggtcacagttgattagttatctccagatgcaatgaagaaagcaaaaatttttcaaactatacattccttccttaaagtgagcaacttacaatcactttggaacacaaacttcatgccaggtacactgtagctttccacatagcatcttatttaatcttcacagcatcctgtgttatcagatttttgtggcaggtgtagaaactgaggctcagtaggtctaagtaatttgctcaagttcgcagctaagtgacagaaccagagtttgaacccagttgtcttcgaagcccagatggtaaaattctaccgggcgacatagccaagtcagatagtccaccatctaaagatctggggggctacatagattactagtcaaacaagtaagtgctgttttctatcagaagaactctggggaaacagtaagttccttctgatctgatcaacaagccaagtgtgtgatgggtcacgtgtccctgaaggctccagattaggaactgcatcatttcgtgcagtccacaaaatgaaggatagtggtaggggctgggaaaatgcgggcgcttgggtctccttagaccagccagggctgtttcaaggtccatacagttgaggggtaggaagacgcagtcccacgtgactgaagagtgctcacactcctttaacagtttagcaaggtgtatttttaaaaaatggaccttaatgagaagacacactgggatagtatcctggagggatttttttttttaagttctaatcaactagaaaatgtgacgtgggtgcgtactgtgattatttaacattcattattcactgtatgttaggtccttggttgatgtggatccccagggcctagctgctgttctgtgtcactcctgataatttttaaattgactatgttcttttaaccatgttttaaaaagttgaactaccccaatgtgaacactttccatttttgctatataatgagagtactttcattcctttaatgtttgctttttcctttgatctaacaatttctcttcaaatttcacagttttctgttgctttaggattgaaagaaccgattagcccgctgggagcgtgaaacagacttaaaaaaaatctgcatggtatttcctcccagtgaaattaatttaggtttaaatacagggggaagggacacaccttgtgctcgagtctctttctctcacacacctgagcagttcctatcctgaaagggcacagtcggacctgctgccaagtcttaagtcttttgtgagaatctttttttgcaaggcacggagaacctctttctctttgacaccagctttgtgtgggcctgatgacacgtttggacggctctatttctttgaaggccaacctcagaggcccacggacgcgtcgggcactgtccgtggctgggttacttaagtgtagctgggttggcttcccgggtgttttaggaaacgcaccttcttgcagggcagggaccgtcagctccagagcaacaaaggacaatttggagaggagtggaaggagcgctccatagtggctctgtcatcccaggttcccttctgcctagcaccgtggccctagtgatcccgccttcgccctctggatcccccacccccactgtctcgctgctcgagagcccggcggggcgcggtgagccccaccaccttcccccacaccctccctccccatccccttcaaatcctaggagcagcgctgcgcgcagcagccgcgctcgccccgcgcccggccccggcctccccagcaccccggggacccggtcccccgtcccgcctccccctgtccagcagtccgcagcctccccctccagccccagtggcgggagctgtcaagcccgcagcagccgaaccaccccccgagcgaccgcgtctcctcttcttcctttgtgtgtgcgcgagcggagttggggcggagggagaagggggaggtcgctctgtctgtccgtctcccgccgcctctgcccggtctactcgaagtgcggcgggagaggcgggagcccaggagagggtgcgggagctggcggggcggctcggagctgccaggacgccctggtcccagccgcgcacaggggagcgtggacggcagaggggctcggcgggagccgagatccgcccgtcccggctgcccctcggcctccctctgctcccacctaccccctgacacccatagaaaagcgtgcaaaggcgcggagcgggacggaaaccacaaataaatagcggcggcggcagcgcgtcatctggtggagcaggaagtgcaggcagagtccggaggctggtgctttctgcgcgtccccaggactttgccatgggctgggggccgcggaggctgcgagcggccgggcgagggcagcggcggcggcgtccgcaccggggctgagcgagcagcgacgcgaggggcgcgcggagatggcagcgtccagcaactccagcctgtccggctcgtcggtgtcctccggtgagtttcagcccgtcgggcgctgctgccgcgccgggtctcgccccactgccctcgccccgcagcctgggatggacagagcctacctgtggccatcccgcccgctctctcggaatgggggcaggcgtccggggtgatacttgtttggttcgccagcacctcggtgcccagagcacctccgcgcctgacatctgacagcgcagaggtgggagagcggtggtgcccttagtgtgcggacgcgggtgttccggggcttggagtgcagcgagcgaaaagcgaaaggagcgggcaggctcgcactttctggcgcagctggagcgggggctggcggggcggagaaggttggggtgaagcagagcgccccgacctgtttgccgtgccgcgcccgctaccctggacacccaaatccggagcagaggggagcaaaccctcgctcctcgcagacttgattttctttgtttgtttcagaaattagctctatggagacactcgcttgggcatgggttttagacagcagcaatgaagggatgtatctttctgatcctgattgaagtgggttaggggaagagaggtcgagcccatcctctgactcttggcacatttacgagagagagagagagagagagagagagagagagagtgtgtgtgtgtgtgtgtgtgagagagagagagagagagactccttagagattttctgataatagtggctgtaatttcactagcaaggcatgcattttttttccttttaagaatggttgagcaaagggaaggcttctttcagcttttctatggttgatcatcgggtctaattgaagagaaaaaaattgctaatgaatctgaaggagtaggaatcaatagaggcagacccactggtttctgagtatgacaggtttctaatcagaatgatgcattaggtagaattcctgtacctctctggtcattgaaaactttaatgacaaacccaaagggatagctgataagacatttagggtagtatacagtatttaagggtcaagaaggtcatgaagtcctaatggaagtgcttcaatatattaatattgtattaagtcccattgggctgtttttattattattcgcgaattaaactcaaaggaagaaacacctttttggaggcattggatagcaagcagggcaaaaaggcaaccacagctttagatgtgtaactcactaaatcataaatgcaaggtgaatttgactaaggtgcaattgtgatgtggcacaaggtgatcacttgaaagccatctgttatctttcttggcagatttacttcctgggaaatggcacttcctttctcgatcactgccaactaattgaaaacacgttgttgttaggtgtgtgatatagttcaagtttctagtagtggcagccaatggggcagaagtcatatcttattaagagcagcaacaagttgaccgccgtggttttaattctgagaactcagcaaatgctacagtttatttttagtaccctcaaaccactgctgctgtttttcaattcattttggttgactaacattgaatttaaaatacagtggtgttggctttctattagcatatggttatccctctcagaaaactgcccactagaaaatgaactggtggggcaaaagaaaagacgaaaggagaaaggacaaggagctggtggtgtcacatgatttactggtggcatgaattacagctgctgtggcatctgaatttccagatcttgatgtagcttaagaaacctgattgaaaatcctaagtcagccttcggaagaatacgttggtttgaaacaacacagtatgagatttagatgatggtaattgctttcagataggttagagatgcccatgatagttctttttcctgctttatttacccctatttttaatcctaagggaaaatgggaaattatgtgaaaactgaaattcaaaaagtgggcatggatgtattgtttggcatgaatcagcctagcccatgagtttatactgcctaattccccaattaatcaggcactttgtcttgaaaaatacagcattgtagttctcttttaaagcacacttaccattgtgtggatcatgaataattcagatgacacaagcaattcacacctgtgagaggtgttgggcagaaagaatagagtctatttgtggtggcagctgggctctctcaggggaaggccagaatctgagaaattagggcactccgtcaatgtattaatcactattttcaagggcctactatgtgccaggcagtaagttataaacctcagcttcaagaaggctaagggggaaagataattgtaggattccctctagctctgaagttctgggagtattgtcttttaattctggcttcatcaccgaccagctgggtatcttggagtgagttacttaacttctccaagcctcaatttcctcttttgtaaatgaggctgatactgatgataagacctacttggtagagtgtcttggggattgaatgaaataatgtgtgtggagtatttagcacagggcctagcatttaataaatgcttaatgtgaataaattttacttctttgaggaatgaaaaagaaggcattcacgggctcagaatttaggtggagacatgaatccaacacacaatccacttctttcatcacacgttaaatttgatcttgaattttgggcttcattaaataagcacgcgagtgttttccaggtttcaggcatagccctgagtgtttggcatggaaagatgagtcaagatccttttcccttatcctccagcagccgagacaaacatgcaaacagcaacctctattccagtttgataaaacaaattctgtggagaagggtgcagaggagaggaattgacttagtcaaattagaggggtcagtggaaatgtcatatgagttgggccttgaaagctgagtagaatttttccggaaaacaaatggagaaaaagacatttcaggaagagagaagagcttaggtaaaggcctggagatgggtaagttcatggcattattttgactttctttcttgggaaagttatgcttacaggcccataagcagcatcatgcacagagctgccagctcactcattgctgctgctgatgtaggaggttttctttctgttcaggtagcagtgggtttgatggaacagctctggaagccgtaggacatttgggcaattgagcagtgaaaaaggaacagttaattctgtagcatccagcatagacagaggtgaagtcaacatgggttatacctctcatagaggaatagctgcgggagatttaggtatgtttgtgtttgcagagtaaagatctaataatttgctcagcattaaggtcaaagttgcctgattttcctgagaatttgctctcactagctgctgttaaactacatcgcccaaatgtgtcatttattctatggtaccaactgagacataacaaatgaaataatcaggttacaattaatttaaaaatacattttctgagaactcttcatgaattttcttctggaatattcaattatgtgtaaaagaaattgctttacctttgttttaataactactggtaattaaatttcacaatcacctagattggcaggaagctttgattacctttattattttaaattgcaaaaataaaaaaaagttcttatccttaagcttctaatttagcctgtggttcttggttatattctgagataaacaacggccaatttgcaaaatagtcttcttaataatcatgggttacatttgcttgtataattaaaataagaactttttgcatattagcaatatgattgccaaatggataatttcacagtcaagaaaaaaatcaacccaagcaaatcaataaataaagaagatatgagatgttctcagtaactgaaaagggtaaaacattaaatattaaaggaaccctggggataagaagttaagatttggaaacgtaaacccactgtattatcaaaataaagttgacacagacttttaaaattaaaatgcaaacagaaaaagataacaagtcagtattaggtgcagtcttcaaaaccttaattgggaaaagaacattcctgaatggattgaggtatttatttctttaaattctatacaacagtattgtgggccaggtaaatcatgctgttttctgctatcacactgatgttgatgtagaaatgataaataggaattttcattactcattattggggagtcaaaaccagtaacgtagataagtcttccatatttctagatgcaggtggcaaaactgaactatagtaattctggcaagacttatgtatgtctaactagaaattctctgcatccaatactacaaaacagggtatcttactgaaacagacattctcactgagaagttttcttttggacctttggatttttcagaaattttcttctggaatattcaattatgtctaaaaaattgctttgcgtttattttaatgataactgctcgataattaaatttcacatcacctagactggcagaaagacttgattgccttttttattttaaatcacacgtgcacaaattgtgatttaaaatataatctcaaataaaaaacttgcaaagctaaaattaaccctgtgagagaaattatttactcagatgaggagtactagtccttgttgtttttctcctgagcattccatacctcattttaacttattagattttattgtccattgtagcaactcagatgaactgagtgatacagagtctgagaggtaaggagatttttcttagcatgctacatatttgcagtgtttgacaagggggacccagtgatttgtgaacttgtgctgaaatgctggttctccccactgaccccatgaagtgcactgggtgaccctgtcatttgcccaacttttggggaatgtgaacaccaggtattttcaacggccagtctgtgcagggtttagctggacagtgtgttctgagagctgccacctggggcctggcctgagtgtcagccgtgctgagggccatctgctgctcggcagggtctcccatttttgcacaatggtggaagcaactggacatttggtttggagcacctatacatgagcagtgtcacataggaatgttttggaagagttttctgccagaagatcaagattcctgtcaaggcaaacacagagaaaaagacatgaacctagtgatagacagacatatgattaatagcatcccctatcacccaccaatcatttatcttttatgaatgtatgtattctcatttcatggcttctgaaatatgtcatttaattttcaaaacaaaatggctttttccccctccttccctctcttctttccttcctttctccattcttcccctccccctccctcttttcttccctccctaccttccctcctccctccctctatccaccttcttctccttccttccttctttccttccttccttctttccttccttccttccctcccttcgccccttcccccctccccccttcccccccccttttgtctctttttcttctctcatctgttgttggtcagatttctatttagagatgttttcatcaatcccacatttggttttctttactgttcgtagtttgcaaatcctctaggcaccttcctgcttttccttccctttggcccatggggaaggaagctggtattctgtctctcacatggattcaggttagggggtcaagatggatacctgtgtctctggtgcaggctggttggtgtgacagaacacaatgatgtgtctccaagctacaaacaaatgcagaggttcatttaaagtctccatggctagaggaaacggcagtcagagatgggccggccctataggtagggtgctctgcaatggaacctaggtggctgtcctctggggcctgaagctgaagaattgggatgagtgtatcatcaactggccactaacctttcagctgtgcattctgggagggccagccactagctgtttgtgcaaataccctgcctttctcctcatttataattaattgtacacctttgtgagactaatctgaatatagtctctatagtttggactaattttagcattcctttgcttcaacagtttggcctgtcaaaatcactcaacctcagcctgtttgtactgcagtgtaaagtattattttaaatcaaccagtagttttaatctcctaagaaataagagctggactgactagactgagagcaaggaggaaccttggtagttgtttcacagattccaacattgtataagaaaatcagagcccaaggaactcagaaactgtctcatgccactcagttacttgacagcagagctagagctggaactgtcatctaggacccaagctcctgtgacattaatgctccccccacccacttcctggctcatcctaaagagtagcatcatccttagagaatttcttgtagacttttttttttttctctctggcctcatagaggctgctctatttaattacttaatactttcaaaaaagaagtcataaagcgctttatattttaaatgggcctcagatctccaggctgttgtacccataaaggcacaaagatttaagtggcttaggtctgccctgtgtatagctgtgttgtccagtatggtaaccattagtcacatgtggctatttaaatttaagtgtaaaaatattcagttcctcagttaccctaggcatctttctagtgctcaatagcacacatggccagtggctaccatattggactacacagacacaaaacatttttatcattttttacaggaaattctctaagacagagacaaaactaatgtaaaatcaacaagctaaaaagagaaaatctgatccagagcgctcccattgctgtgtgtgctgcttgtgctgtttaggttatcttttactaattttgcaaattgactttttaaaaaagtaatttctttatgaccccgagggaaactgtggaatgacagctggaggatgatattggggagggtaattgaaaatgtttataaactctgtagtcctgaggtatgattcaagctttatttaaaaagtggtttgttgtttccctaatggcaactcaatttctttttcaaataaacccacagtgagttctgatttcaccctcaaagaggaaaaagtgcccatgttcaaaaagtttggatcttaccattgaatctcctttaaagacatcgtaaggaaaactgtgaatgtgtggactgaggttgctagtggcatatacaagccgtgttatttaaaagagattttctaccaacctggccatcagcagctagctagaaggatttttacttctacaaaaagcccacatcagggcaaagcaaatgcattggtttttagaaaataaagttagcttttggaattttcagcacatttaattggggggaaatgcatgcaaataagatgcaggaatatgacagtttctaagaaaaggaaacagttctccttgaacttctgttaccatcctcaagtgcaacaaaatgggaaggtggaaggtgtctttaaagtgtcaagttaactgtcaagaaagaggtgaatgttgaggccattggattcagaaactataataaccaaaagactgtgacatggtggcttattatttattgacataacttagatcattgatttagggcaatatgaatcacagaagcacttgggtgataaccttatgcaattcttttctcatcggaggcccagttcctggattttatcgggccccatcattgccctctgcaccctcagtactggctgggtattgtccttttcaaggaagtgaaacctagcgcttccttattacttcacataatgccatattagcaatgtgaaatgctttttcttacatgatgttgcttccatgaaataagcccaagagactgttgggacagcaaagaaatgggaagcagggagcgtggctgttgcagtagatctcctgcagcatgtgtcagaggctggggtgtgccattgacctctaagggcctgattctcaagacctagacctgcacagtccagtgtgacagccacatgtggttactgagccgttgaaacatggctagtctgaattgagatgtgctacaagtgtaaaattcacactagagttcaaacgcttagtacaaagccaaaaaatataaaatatctgactcataacctttgaaatattgaatatatgtttaggtgataatattttggatctaggcctggcacggtggctcacgcctgtaatcccagcactttgggaggccaaggcgggtggatcacctgaggtcaggagtttgagatcagcctgaccatcatggtgaaacctggtctctactaaaaatacaaaaagtagctgggcatggtggcgcatacctgtaatcccagctattcaggaggctgaggcacaagaatcgcttgaatccgggagaaagaggttgtagtgagcagagattgcgccattgcattccagcctgggcaacatgagtgaaactccgtctcaaaaaaaaaaaaaaaaaaaaaaaaaggatctattaagctaaatataatatatttacaaaattaattttacctgttttttaaaaatgtgtttaaggtaactactagaatatttgaagttacatgcgtggcttacattatatttgtattggacagctgtggtctggatgactccagtgagaatgttctaaccttgatcgcagaatctgccatacaaaacctgctgatgcactgctcagtggctcctgtagccctgtctacttatcctccattcaccaaggcagaaacttaccaaggcaactcagccctgattctcaggtccctgtttggttttagtcccagacattgagagatgtccttaatttttctgaatctttatagtgactttcaagtgaagttctataaagaggaacaggttgggacatttgtcacattcttgtttagacagattttgtgttttgttttgtttgggcttcagtttaattctagacttcatgtatttttgttagatttatgtatacgcctccttccaaagaaagcctgcaatgctatgaagttggaaagagaagctgaggaaacaaagcacacgtttttctctctctctgtgtgtgtgtgtgtgtgtgtgtgtgtgtgtgtgtgtgtgtgtgtgtgtagaaaactcttgcctcatagcctttgtaccgtgatgtcctgccatggataagtatgtgggtttacatacacatccacacatatctgtatttctgtatgtgtgtgtatatatgtatacacagaaagtggaagtggattaggttccaattatttccagtcaaatttatatcgtatataagttaatatcaagggaaatgaaaagtcagttctagcattacttttagtaatgaaataattcacttgggattatgctaatgatatgtagatattaatacacataatttggctgcctaatattgatttaagttgctcattcaaattctctttattacaaaaaaataaccattttgttttacagtgcttgtcctcagagacagtgagatccagtaaaccatacttatttggtaaataatactatttttgctgattttcatatacacagagagcactattctctttcagtaggtaccctttgagttgttaatttctggttggggtcctggttagctctagccaaatatcctctctggatctgcctcatgatcaatgcctagggttgaaggtactcccggtgaccagggcacagaagtttttgttctctgtgatgttaatatgccctagggttgaactttggtctcaggagagcccgagtcctatgcttgctttaagcagccaaactaatccacatgccttttttcggaatatgaattcttcagtggaaaaagcaattgacagaagctttgtaaactctcctgaaataattaatatcagattaagattagaaatagaatcacagcaaatcctaggcaattacacatgtaagacatgattttgagttaaacgatgtcatctgggttaagaacatagtaattgccacagtacttatttggttccgcattctaaagtaatagcagtaagggtattttgtaaaaatgcacaacagcctttcagggaggaaatgccctgcagacatcttacttttcataaatagctgagtgtaaatctgtcattcaggagttaatgtaaacatgtctgaatccatctgtagtttcagcttgtgctccttcttacaggaatgagtttcagccattttctacctatagagcgaattggtgtttcttcctattgctttaaatttaactctctgaaacttatttttagcatccatttttgggtttcatgaattaatgtgggttcattggaaccacacagtccaagggtggcgttgtgttataagctctaggaagctggggatctggtccaaacaccagcaccaaatagctctcagagtttctattttcttatccgtaaaatgggctaataatactagttgttagaatcgaatgtgtgaatggctgtgaaaaaacttgaaaatttgtgaacaaaacctaaaaatccctgatctcataaagctcatattctaataagatgcaccacaggttcctttcctgagtggtaagtgaccactcagaactcgtgatcttctaaggtaactggaaaagtttctcctaaataccttaccttgcttttcttcatcagcctttcaaatccttggagtgtaatcgtgccaacttagagtttctctactctatgtaaagctccaatatgcatcctgcagtcccaacattttaaattagctcagtcaatccaaggaacaccactgtttatactttcccatctagaggaatggttctttattatgtaaaaaaaaattatacacattttacgtaagatgcaatatatacaaaaaaaatcagtaatagcgtagccacataattattaggaaagccaccacccaatttaggaacattacctagccttgtgtcttcctctgtattcctctctctttccttccccatcatatttcattccctccttccaaaggtaaccactactctgaattttcaccttattcccttgcttttctttttaaaataattttatcatgtatcactaaaataccggcttcacaagggcagctatttttgttttgttcactgctggatctccagtgcctagcacagtgtctgacatatacaagcactcagttactgtcataggagtgcaactgtagccccttccctcctttatctcttgtttgtaaatcagttctgcaaggaccctgtcaccagttcacattagtcacaggccttcagtaacttttagaaaaaaatttttttcccccaagatggaaaaaactctatcgcccaggctggagtgcagtggcatgatcttagctcactgcaccctgcgcttcctgggttcaaggatttctcctgcctcagcctcctgagtagctgggattacaggtgcgtgccaccacacccagctaatttttgtatttttagtagagacaaggtttcaccatgttggccaggctggtctcaaactcctgacctcgtgatccacctgcatcggcctcccagagtgctgggattacaagtgtgagccaccgcgcctggcctagaaattttttttttaacttatttgcatgtacttgcaacaggagactctgagcagaatcacatgaatttatctgaatcaggactttttaccttgatttgtggttcacaagcacatttcaggagtgaatagtgaacactgaagaaacataagtagtaaagctagagttcaacatggagagccacagggagattctcaaaaagcgatgctgtatacatgctacaccagggatgagcctggaaaacagtatgttaagtgaaagaagtgaaagactgcatactatatgattccacgcatatggaacactcaagataggcaaatcctagagacagaaagtagatgagttgtcccctgcggctgagaggtttggagtgaaatggggagtgactgctaataggtatgagttctttttgtggtaacgaaattgttctaaatttgattgtggtaatacttaatagttacacatatctgtgaataaactaaaagtcattgaattgtttgcttttaaacaggtaaattgtagggtgtgcgatttatagctcaataaagccattactttaagaaagcatagaaattgatattgtaagaaagagaaggtgaatcagtcataacgtgagcaaacagaaaatacaaacccataggttaaggccttcctggacaggatgcttgcaatcagatgggaggcatttcaatccctactcactgataacttgctcaatacatgggggtgccccttctcttccccttttcatttccacattcatctttttctgcagccagcccctgaccttctcagatagttccatagagacttgctctctagggctggttagttcagcctccactagataaatgcctcccttccccagtatccccaaaaggccatggcaccctccttctcactgaagaatgagggagagcagtaggtcccctctgctaatgctggacaaagcaattagtgcatttcttatgactagttaattagctttttatccagctttttaaactctggccacaactctatggcctcgaagtagagtgtgagtcatccaggaagcaagtttctctactgtgtgcctgatgctcctgagtattattcgcacagtgatgtgtctgtggctgcctccatatgcccccacttagatggatgcttgtacagacgtttccaaggatatcatctgctggctcttttgttgtttctaatcaaagaaccgacaccctttgatcacaacagatcacggtattgtactacaaagactttgttagaaagacttaaattttacacgcttgtagctgtcacagaggttctgacagtatttacttttaccccacacaagtaaagaaaaaatgcatttgatcagatcacatggaaaatatgagtgattataaatagtaaattttctagaaccatgtattgttcactgtaaggaacctagtcaatgaacattttttaatacttgctggttttgagtgccaggttgttgcaaaagtcctcttcttcctcccaagtatagagactcctctaggtagataaactttctgttaattggaggaagattggccctgtcatggaattaatgaagctaaagacagacgtctttggggaactgagtccctgggtagccactttttgggcaggcttcagtatccaatggcctgcgtgaatgtataggatggctggctccccttcaagttgttcatggcctttcctcctttttcccataggacacctgagacaggcacccccacaaaatacaaataaatgccccttcacgggagtgtgaagacaaagcaagtactagaacttcttccttaaggtctcattcagagtgttttcctggcaacccctagaggaagtgggcacgggctacagtgactctgttgttctgtgtcttccctcaggtgaaatctggccaccctgggcaccctatgacagcagcacacgtggggatgatattgtgccttgcgctggcctctgcggttcccctgacatatcagattttagactttgctcctcctgctttctaatgtcacgggctaagccatctctaacaaaagactcactgttcctgggacctgctgttcactcaaacttttctcatgctaacaccaacacatataacacattcacacctcctcacatcctgaccagaccattccaggatgcaattattgtaaggattaggacgtttcaccgcaaatacagaaaactctaaaacaaagtgctgaggtaccgtggttgtagacactgcagtatctggctctgtctccttctcttagcgctgccctcttggtcggggggccttgtcctcagcctcactgtctttacagggtcaagatgacaatagcagtcccctgggatcatatctgaaacagagaaggggaaatctcttcctcctcaccctgtggaagataaaaaagactttctcagacacacctgccccacccccaccccccagcaaagttccccttgcctcattggctacagctttgtcatatgcttaggtgtgaaccaatcactggcaagggaataggattccctggatgtacttagtccagttgtgacccccttcctggagtgcagatggtccagcctctcctgaaggggtgaggaggcctgaacggaacagggttctgttaagggggaagagggaaccaagaacatccgccacaattatgtcatgaatgtcctcagcccttagagtctctaaggccaccaacaaaacactgagaattccaagacgcatggcctctcatagtcaaaaagcttattatagtcttagttgagagccaagcaattagtgcaactattcacttagtaataatatcactccctgaaaaaaatgttctgctaacctactacattaagatgactgacaactcatatgttgttttcacttgttagtgctttatggtttgaagcactttgttttatggttatgaaaaaaatataaatccattaatttaaaactggatagagtctttagctctaatgagaagtaggacagtgagggttgaaggttttgattcttgacaggctttaacatccctgcgcctgatgtaagttggaactatattattagaaaggcagggaataatagtagatgattcagcccactgccgcttgctatgggagggaatttttaaggctttcatttatgagaaatagtgatcattagcagttctttgtttttaaaacagagattcctacaaacggtcaagtccagtggaataaatgtattggtgcctaattggagaaataatttcaggttattcccaaggaaaagggaacaggcagagggttttggagagcagattcctgtttttcagttttgtgatgggccagggtgcgtaaagatcactggatgaggggtcacgtgacctaagtctatggtagttctttctcagcatttactttttgtgtgtccaggggcaaattatgttatcattttgtgactttgatgcttatgtgtagaattattagtttggcccagatcatctctgagggtcttaaaattttatgatttttctgatctgcctgtttcctcttgccaatttatggtgccttggtggtcccccaagggaacaaccctcttgtgtgtaaatcagttacactcacatatacacatatttcaaatagcaattaccagtggcatcatttgttccaggcacccagcctgtaagacatgaggactgttgggtgtctgtaccgtaattgcttttcagtcttcactcttagtaagcccagaggtagtccaagtatgctccaaggcggtatcatacaagccttttggaatgtgacctacactatgaaacccagcacgtacacacacaggcacacacacacaccccacacacacaccgtgcacacaccaatacttcattccatatgtacttattatttaccatgttccagattttagagatactgcaatgaacaaaacagacaaaaattctggaccttgtggaatttctaaatacagacagacaataaaccaaaggaactatatataatttgtatatataaatgtgtatcttatatatataattatatctaattattaatttatatggtatattagagggtgataagttctatggagaaaaataaagcaggaagggagacaggaaatgctgggggtaagggggtctgagtgttaagtttagtggtcagagaaggctttactgagaaggtgacacttgatggtgagggagccagccatgcagatatttggagaaagtacattccagacagaaggaaccgcagctgcagagtcccaatgcgagagtgtacctggtgtgttccaggaacagaaacaaggccagtagagtgagaaaggggtaaataggactggcagggaggaggaggcggatcatggagggcctcgtaggccgccctaaggactttggcttttacactgagataggttgtccctggagggttctagaagacagtggcatgatctgacttaggtgttttgtttttttttttgttgttgttgttgttgttgagacggagtctcgctctatcgcccaggctggagtgcagtggcgcgatctcggctcactgcaagctccgcctcccgggttcacgccattctcctgcctcagcctcctgaggagctgggactaaaggcgcctgccaccatgcccagctaattttttgtatttttttttttttagtagagatggggtttcaccatgttagccgggatggtctcgatctcctgacctcgtgatccgcctgcctcagcctcccaaagtgctgggattacaggcgtgagccaccgcgcccggccctgactgaggttttaacagatccattctggctattatgttgagattagactaaacacaaatgctgcatgttggcacacacacacacacacacacacacacacacacacacacacacagaaacagaagttccacaaagagagttcatcctgttatatatgatgtgctctgagactgtcttttctattgtatttctcttcatttatctaaaaactatcagggcccacaagttgatttcagaatccactctagagtggtgatgggcactttggaaaacagattagaaattggtccagaactccaaagatgtagcagattcagttagcctgctcaaggcatggttgcggtatacagaacaccctataggcccatagtactatttaatcataatgttcaaggagattttgttaatttttttaacttgctacactgcgtagcactattttattgaatgatcatttaaaagtttcgtctttccctacagtgggcttttattacaaatgtatattttaataactttttataaagaacatttcaaatatatttagagtaaagagaaaactataacgaacctcttaccatccaacttcaacaatgatcgcatcatagcctggtttcacttccactccatcccatacccaggattattttgaagcaaatcccaggcttggcatcatttcatctgtaaatatttcagatggtatctctaaaagatagggactcttttttaaaaaaagaatgctgggctggactgagctagttacctcctgctattgtggaggcaactcacttcatcccaacttcttgatacttttgcttctggaagtcatatttctctaacatcttccagaaaagtcttaaagctgccttaaccttttttccagtccacctcttaaattttttccccctcttcctcaatactaacatgagtgtggatctggcttgtctgcaaagcttgccttgcttcgaagcatccgactgtaaagaatcttaacctatggctgtgatttgtgggcctgaagaaaactatccatccttgcaaatgtcttctgctgagatgcctcacacggagactgtctctcctcttcttcctccatggatctgcttattcaggacagccctgattcttccaccagtcccaaaggcaaacaacccattgctgcagagaataatgccccaaaaaagggagacgaggtcccagtcaagaaacagaagaccagaactgtgttttcttccacccagctgtgtgtactcaatgatagatttcagagacagaaataccttagcctccagcagatgcaagaactctccaatatctggaacctcagctacaaacaggtgaagacctggttctagaaccagagaatgaaatctaagaggtggcagaaaaacaactggccgaagaatagcaatggtgtgactcggaaggcctcagcacctacctaccccagccactactcttcctaccaccagggatgactggtgacctgactgggaaccttccaatgtggagcaaccagacctggaacaattcatcctggagcaaccagacccagaacatctagtgctggagcaaccactcctggaacactcagacctggtgcacccagtcctggaacaatcaggcctggaacagtcccttctataactgtggagaggaatctctgcagtcctgcatgcagttccagccaaattcaccttccagtgacttggaggctgccttggaagctgcaggggaaggccttaatgtaataagcaaatgactaggtattttagtactccacaaaccatggatttattcctaaactactccacgaacacgcaacctgaagatgtgtgaagatgagtgaaattgatattactcagtttcactctgggtagtggctgaatccttcctctcccctcctcccctccctgataggatttttcttgtatggaaaccatgtgttctggcttccattatgcctatccagtcaatttgatggaggatacagtatggttggagcctaatcagagaggtttctttctttttttcctattggatcttccggagaaaagacgttttaataaccttggctactaaggacaacatgatagaagctgtctctggctatagataagtagatctaatactagtttgaatatcttcagggtttagaatctaacctcaagaataagaaatacaagtacaaatttgtgtgatgaaggcatattcctattttttgggattgggaggctttacttattttttaaaaactattgaggtaaagggttaagctgtaatatacttcattgatttcctcaccttttttggttctgttttactatatcccctaattttttggtgatgctaatctttgtagaaggaggtcttgtatttactgcatcatgatgacattagtactcctttagttggtttaagtacaaatgaatgaaacaactatttttcctttagttgattttaccctgatttcacctagtgtttcaatgagtaaaaatacagcttaaacattaaaaaaaagaatactgcattactgtaatctttgtgcatacattcacacaagcaataattgcgctttttagtctgatcagcagtgtctttattcattagtctcagaagggaaacacaagtgaccttaatgaaatgaagccgtggtcatgctttctccttcctgattccaaagatggtgtttctggatgctgctaaagccccctggtaaataaatactttctcatctccagaaatgagtcaattcgatccgatttccctttttagacttccatttatgctcaaatatggcctctttttctgtggctcttgagtaattatcagtaaacacctagagtaaggccctaggtcttagtcatcacggtaccaccccagtgacttagcatggttactggcacccagcagcatccctcacattttgttaatgttttacctcttttcctatgcaggagctggagtaccctctccctagtcctctggcccgtcattcccttttatccatatgttataacctcattaaagtctgacttttctaggaaacctcgtttctaccaggatggatgcctttgtggatcagtattgacgctttgacaggaggcttcaagttaatctcaactcttacagaattccttctattccatgaatttattatcctcagtcaatactgtaatgctcatcttcttgtggtgtctttcctaatcttcaccaacagtttattggccagaaactaattgataggggctacgttactgaaaacttcgtcatttctgaagatgattaatagtcctaatttcaggcggaggtagggacatatttttacacttgaatatatgttatgtaagaatccaccattgaatgcctcttacttaatcacccaaatattttatctatgaaacttggcagggagatggcaatatcctgaaccttatttttctcattgtttctctttcctctttctcatctctctttcataaaacgtgagtgcagagtggatgccagccaccatgcttggctttgaggacataaatagatacgtagcagtccatttgtaactctttattcggtctgttctcagtggactgtcactccaggaagggaggggcccttgggtcaccagctactagcagagacactgccacaccagaacttcttggaaacttttttttggatgaatgactgagtaaatggagacatgaacttcactgtaaaggagttcacagtccaaagtttgagagtgaatctggactctgtgaaactctgcagaacttgtgaagtcattaacaattaaatattttagttcaaactcttcccttaaattattacccagtctgagatttttgtgccgtttcatagatgccagcagaagttctgcacggggagtcttacagtggcacaggtacagcccttagacagaaaagaagcctgaggccgtcctctgcattcactgtccatttttcccagagtatgtggtcctagctacttgaggcactcccaacttctcattctttcgacttctgtaaatgtcacagtcttgggaggcctcccagaggtcccaattaagggtcttatttagcctggagccagaactgtagttgtaactccttaatgccaggaaagcattttttaaaatcagcacactcacctaagtctgtttcctaaggtgttttcttctatctgagttacaattttatgttctgtgccaggaatcatttacttctggttcaataggaattaaaagtacttgttgctatgtcattccagggcaaggatttgcttctgcttggaagttaggtctttagtgtgtgagtatatgtgagtgtatgtgtatgtcattgtgggatgttgcacataagtgtatgtctgtgtaataaggcagattcaatttctcagggaaagaaaatgttccaaggaccataacctatgggacaaagcgttagctactatcttttcttttggctttaaattatgcactcttcttccttaagtgactgattctgaatatgaacgcgttcttttaaagagtggaaatgatatcatttaacatttaaatattaaatcttattatgtaagccaatttcttaaaatccccaggtggagtttgtaactacgcctaagtaattctccaggtgtaatgactggcaagctgtcgagtagaaatggcagagaagcagctattgttgggagaggctggaacttctttgtttttagtatacattttagttgctgaaagagtccttgtagattttcctcaaaattaaaaaagccagaggaagaggaaattacaattaatagcctggaaattccaattaatctctcaaatagtgattaatttccagagacatggagactctgcagtatatctgggaggaaggaaaagacaattagggttggggaaattggtagaggcgcttgggtaggtggaaatcccaccaggattgaagactgcactaggattgagataattgacaaggttggaagcttgccaaaaactgtatcaagtgctgtctcttcctaatgggcaagtgtgcccattttgaaacccactggccatatttcctaaaactgtctattatcactttgtggaaatgttcaaataagatctgttatcaaattacatttctttctttgtcactttttagcttatcattccgccaaggttttggcccctgcccttcttcctgcttcttgcctccttgaggctgagctcttctctctccccagcctctcagtgagctggttcaggtctgtgttggtttcagataacggatgctttaaatttaaggtagtggaaaccgctgatctagcctggaaatcacaaggaccaattgatttatcaatttttcttctataaaggtaaaataataccatggcaattttttagtgcagattattgaggctcagatgaatcagaacgaaggggaaattaaccggctatacttatgaaatgcgaatgctatgtttgcattgttggatggattcagtcttaagcagtttggaacttatttgtatgtacctgaggttttaactacatggtaatgaagatggtgttaagcttttacaggagcacggcttttgatctgctctttctccccagtgtactaacagtacttattaggaggaaaaacctccagagagtcagaataaatatcatagtcctttgaacatctaaatatatgcagcattttacagaaataatgtaagcgaactaaccgtttgtggtcagctggaaaacttaactttcagagggatttgaccagctatactgacctagaaaatgaaataagcagtttggaaaatctggtttgtgcatataattatttttatattatctcaggctgtgccttgcaatgagtaaaccacggtagttatctgacctattgctctaccactgccattgcttcaacacagtaattatgtaagactcagcatgtttttaactaactaaatgcatgcaggacattccttagcttcagcagcctatctggagactactcaagggctctttatcagtctttcagtttgaatggaaaagagactgtaaaatcatgacctgcgttaaaatgtgtagactgggagggccattgtggaaatatttaatacaagcacttggcacttttgttagctgaaaatgccctgaaagtttatgacgtatcaaatatttctaattaaaatagaaaattaatcttcatgatgaaagaatcctaacagcgctttttatatgaatacaaatatttagttgggatataggttatagaatgtctttaaggccctgaagtcctttggatttactgtttttcattctagttcttcctttaatagctcggagcaaataaaagtgatttcctttagaatgtgcacatgctcctaaggatatctgaataaaagatacgtatctgataatttgccatctcagcatcatcccttgggcagcaggttggaaggcaatagtttaatctgaatgtgaactaatgcttatgcgcaaagacatgtatgtctcttcctggatttgaaggaactgagagtagagcagtttaaccaggattccctagatggcttatcatcctgatgagctagcattgcaatcagaagacattcacttttgcttaaaacatgaaattgactggtagagttcagatattaataaaactagttttagcctgtagttttaacccttttcatcttacatttaagaaaaaaaagacacttaaaaggaaacaatgaattggaactaattacaaagctctaaagggccctgggtgatgttagtctcattagggattgtgatgtcccctcccacccatctcccacccccttccaccccctcactcgccagcatgactctctttccttcttacctgtaaccataaataccagacagccaaagtcatgcctcgtgaaggtaggcatgtggagtggtggaatcatacaatatctgtgttaaaaggttatatcctagtaagataagcgtttggactgtaaactagttcaatcattgtggaagtcagtgtggcgattcctcagggatctagaactggaaataccatttgacccagccatcccattactgggtatatacccaaaagattataaatcatgctgctataaagacacatgcacacgtatgtttatagcggcactattcacaatagcaaagacttggaaccaacgtaaatgtccaacaacgatagactggattaagaaaatgtggcatatatacaccatggaatactatgcagccataaaaaatgatgagctcatgtcctttgtagggacatggatgaaactggaaaccatcattctcagcaaactatcacaaggacaaaaaaccaaacaccgcatgttctcactcataggtgggaattgaacaatgagaacacatggacacaggaaggggaacatcacacaccagggactgttgtggggtggggggagaggagagggatagcattaggagatatacctaatgctaaatgacgagttaatgggtgcagcacaccagcatggcacatgtatacatatgtaacaaacctgcatgttgtgcacatgtaccctagaacttaaagtataataataatataatttaaaaaaaaatagaaggaaaaaaaaagttaggttctaatacagacaagaagtttaggctgttttaaatgtgggcaggctctgtcggagactgatgcagtgcgtattataaatcctgaatcacgaggaatgggttttgaaaccgcagtggcccaggccacattcagacctgaaaaagtcgactctcctagagccaaggccaaattatactcatgtgtagtcaaggtaatgaaagaaacactcaccgtttcccaccactgtgtaggaagctgcttagaaacgtttttaggaaaggttaaaattactaatttaaagaggactgaaataagtcaaaggtgtattttacaatctttagggtaatcattaaaataataatataagaagctcaattaaaatgctaataagggagaaaaaatatttttaaaaacacttgaatgactaaaaagaaagtgaaaagaagaaatacaggaacaaagaataggtgtgataaatggaaaacaaattaagatggtaggcttataagaaactatatcagtaaatgtatcaaatataagtggtttcaacattcctattaaaagattgccagactggatacagataaccaattgtagtaagtttaaatctagtaggttttaagatactttactaagtttaaaatttaagatatactatgtagactgagaaagattgaaagtaaaatgttagaaatatatataccatgcataaattaactaaaagctataaccatattaatatcaggcaaagtagactttaatgcaaaaattatcatgagagataaagagggatatttgttaatgataaaaggaagttggctgggcgccgtggctcatgcctgtaatcccagcactttaggaggcgaggtgggcggatcaccacgtcaggagatggagaccatcctggctaacacagtgaaaccctgtctctactaaaaatacaaaaaattagctgggcgtggtggcacacgcctatagtcccagctactcgggaggctgaggcaggagaatcacttgaacccaggaggcggaggttgcagtgagctgagattgcgccattgcacctcagcctgggtgacagagcaagactctgtctcaaaaaaataaaaaaatttaaaaaaaaaggaaaagttgaaaataaatgattcaaacctccaactccagaatctagaaaataatcagcaaattaaacccaaagatggtaattgcttgaaccggggaggcagaggttgcagtgagccaagatcatgccactgtactccagcctgggccacagagggagaccctgtcttaaaaaaaaaaaagagagagagagagagagagaaagccaaaataagcagtaattatagaagtaggaaacgatatataatatttgaaaattaacaaaaacaactggggctttttttgacaagattaatataattgatacatctctagcaaaccaatcaaggaaaaaagaagagaaaatacaatgaatttcagaaaaaaacaaggggatcaccactatatgtcatagagatcaaaaagataagatactatgatcaattttatgtcaataaatttgacaacttagagaaaatcaacaactttctttaaaaacacaacttaccaaaacagacataagaagaaatttaaaatctgaaaaatcctaaatttattatttaaattgaagcgacaattaaatgccttcccctaaatttaatttcagaccaatattgctttagcaataaattcttccaaatgtttatggaagaaataatgccagtgttacacaaactcttatagaaaatagaaaaagataaaacatttcttaaatcatgtgtgaaatcagcctaacctaagtctgacaagaacttactagtaaagaaaaccaccacccagtatctttcatgaatcttaaaatatttgattagcaaatcaagttcagggatatgtaaaagaatatgtcatgatcagatgggatttattccaggaatccatggttgatttaacatttaaaaaccaatcaaagcctcgttaaaagaatcaaagaggaaaattatgtaattatttcagtagagaagactaatttgattccgcacttggttataataaaaattctcaacaaactaatagaagggaatttctttgatgttatataactgcatacttaatgataaagtaataaatgatttctccgagtttgggaacaagaaaagatcaccaattggcaattctagccaatgcaataagccaagaaaaaattgtcatgaaggttgagaagaacgaagtaaactgttttccacaaatgatgtaattatatacatagaaaatataaaattattgaaaataatgtgactttaacaagaatgctggatgcaaggtcagtgtaaaaaaaatcaagtctctttatactagcaataaataattcaaaaatgaaattttaaaccataatttatagtaacgttaaaaaatcaagtacctagtagtaaatctttttttttccttcaacttttgttttaagttccgggatgtatgtgtaggatgtgcaggtttgttacataggtaaacatgtgccatggtggtttgctacacagatcaacccaccacctaggtattaagcccagtattcattagctgttcttcctgatgctctcccttcctcgacccccaacagaccccagtgtgttgttccccacatatggcaatgtgttctcattgttcagctcctatttaaaagtgagaacatgggatgtttggttttctgttcctgcattcgtttgctgaggaaaacagcttccagctccattcatgtccctgcagaggacatgatctcattcctttttatggctgcatagtattccatggtgtatacatactacattttctttatccagtctatcattgatgggcatttgggttgattccatgtctttgctgttgtgaatagtgctgcagtgaacatacgcatgcatgtatctttatcatagaatgatttatattcttttggacatatacccagtaatggaattgctgggtcaaatggtatttctgcttctagatctttaaaatcaatgtgcaaaaattgcttgcatttctatacacaaataacaggcaaacagagagccaaatcaggaaggatctcccattcacaattgctacaaaaagaataaaatacctaggaatacagctaacaagggaagtgaaggacctcttcaaggagaactacaaaccactgctcaaggaaatcagagaggacacaaacaaatggaaaaagattacatgctcatggatagcaagaatcaatatcgtgaaaatgaccatactgcccaaagtaatttatagattcaatgctattcccattaagctaccattgactttcttcacagaattagaaaaaatatttaaaaattaatatggagcccaaaaaagagcctgaatagccaagacaatcctaagcaaaaagaacaaagtgggaggcatcatgctacctgacttcaaactatactacaaggctacagtaaccaaaacagcacagacacacagagcaatggaatggaatagagaactcagaaataagaaacagtaaatccaatgagagatgttcaaaaccttcaccgtgaaaactgcaaaatatattgagaaaaactgaagattatttaaataaatggagtgatataatcatgtgcctggattagaggattgtaaagatagtttcccctaatttgattaatagattcaatgcaatcccaataaaaatcagttaatttttgtgaaaattatcaggctggttcaaaaatttaagtggaaatacaaaacaccaagaataactgaagcaatactaactaaagaagaaaaaacatggagaacttatgttgttagatattgacttattataaagctgcaataattaagatagtatgatattggctcaaggatacatgaatagagcaaaggaatagaatagagttcagcagtaatggttacagatatatgcatatctgacaaagtacttgtatccagaatatatcaagaatcttacacagcagttggaaaagtacactcaacccaattaaaatttgggcaaaatacttgaaaaagctttcagagaagagaatatcacagtttactgtaaacataaaaagatgctcaacactattagtcatgagagaaatgcaaataaaaataacaatgatatatcaccacccacccaccagaattgctaacatgtaaaagactgacaatgtcaagctattatcacagatttttggtgacttggagaaaataattcactctgtccactctgtccttatggttcaaaccctatatgatcaggtcttcttccaatttttggcagtggcatcccaaacccctctcatttagtcttgccttgtgtccacagccttctcataccatccaggtagatgtagctaatatactcaggtcttccaatgaaacactaattatcaccactccccatatcaatcactatgctgacttcatagctgtaaattaattttgcctgtttttgaattttatatgcatggaatcatataagatttacttatgtacactttcatatttgggttattttactcaacatccatatgttgagatttatctatatattatgtctacctgtggttcattcttttttattgctgtaggggattccaatttctataaatttaattgtatacacttagtaattctgtgattgatagactcttgggttgcttccaagttgggattattacaaaaaatattgctatgaatattcttatatatgcacatatgcacagatttctgttatatacacatggaattgctaggtcatgaggtacatataatatattcagctttacacaatactgctcagcaggtttctaaagtgctttcactagtttgcccttccaccagcagtgaacaaaaattttagttgcgatgtattgacaccatacccatgcaccatttcttattgacttaaaactcttaaaattcttttgacttggctctctaaaaccctataggcagtaaaattcaaatcttttctatttcaagaacaggaagactttcatcaagggaaaggtgggccagactgttgaaaacactgcaggagtagcagcagcaaatgaacatggcgggaaggactgtcacagctgatgttctaaaattggaacattctaagggctacttctgaaacacgaacaattaggtgggattgctgtccaaattaagaagcccttacttcttaatcattaatatagttcctttttcctccagaaatgttccaattatgaaaaattatgaaacagtttgtgattaagtgatactctgtgtaaacacagtaaatataactgaaaaggatagacttttaggccatggtcagatactgttaaattttagttaagttatattcataactaagtaacattaagttatagtgagaaggaacttcacagtacaaacatttttttctatgtgtgttgaatgctccgagcttatttctaaatcctgcttggtttaaggaaagattacaggagagaaattcagaagctaaaggttcaggagccatttctgccattactaactgtgtgaccctagtcacttaatatctttgtctcagttttaaatatctgcagaaattatggaatgttatatcttctctgtttaccaaagagattattgtgaggaacaattgaaatggcctataacagctaatccatatggggataaagttaaagaattctccaccatgttttcatttctatatttaaaataatcttatagttgctaaagtgctattcaaacatgttatattttttcatatgttaaatcacaagataatcttatttgttatatgccttatgccataaacagagcccagcatagtgctgtctgtatttttctcattgttctttaccttagtagaaaggaatggagagaatgattcataatgagtaaaacacatatcatctccggagagagaaaataaggataaaggcagatttccattcaggagaatttatctgggctttggaagtaatttaaaatgactgttccctgtgttggcaatttgtagcctgcctgagttgacacctccattttcaatcacagcaagattgcttttagttgcaggcaattgctaaagccagagatctgaaaaggagcccttttcaaactccttatagatttaaaacagatagaatatgaatgtaattttttctcctgattgtcatcaaatacttcacgaataatttaaattaatccataatttgtctaaatcaagaggaggaaagcatggcctaatcataacattgttgtgttgtacctggacatagagaattagcctggaaagatttgttgctaccaaatctgcaaactttattatagagtagttgtttgggctcatatatatgtacggactctaaaagaaacaatagcaaacaatatcatatacagtgatgaagttcccagatcagcccaccaaaaccaatatatgaaaaactgtgtgcaaatgtgtgtgcctgagtgccttctgactatccatttcaacagagatgtgtatatgcatgtttagagcattatctccaaatatttgttttgcaaaactgagtttgattgtataggacattagtgctgtagtttagcatcgctcttcgtttcctatcctggttttacaggatatggaaaacctaatccagaagtagagcaaagctgataatccttgctaccttatgaaggtgcaaggagactggagctaatcacctgctgtgagcactttgagacccttttttgaggaatcaccactaatcacactggaaaagatgccttgcctcacgttgaggggacagttactattgaaagggtgttagtcactgagcattactgtagttaaaacattattctgagacatgtcctacaaggcatgggattaggcgtttattaataaaactccccaaatggtatttgcaatgtgtcattctacttgagaacataaataggatagaattaaactaacacagaaagattacttatcttataattaagaacattgtacaagaatgaattttgaatttataacaatttctgggctggcaagggagacgtattaaataacctttcttcttaaaaaatatcttttgagacataaattctctgtggggaaaaaacacagaacaatgagctgtcttttctcaattgattgcctgtagtgttacaaatactttgaaaaatgaagggaaatttaacattttaaaatgatctttcagaaatctattattatgagcggggaaaaatgaacaaaagtccttaagtatttaggctttttgaaaacttccattatgtaaactaggtaatactggggatagccaagcccacagagtacagcagcatgaaacacaaacaagagtcactgattttttatagtcagctgaaaaacagcacatctaattttttttaaatagaaaaataaacaatatttcctgccatgaagacagttactgtcttagttccatcttggaaacgtcacagagctttatcctatttattttcagtgcacagtaaccaccagcatcagtttgagtctgtgtattttaagagcatggctaaaatgtcatatgctgttacatatatagcaacgtagggagtggaacactcactcaatataaaaaaatcaaaatcaaaatccatttatacaatcagagtcaaatttatatcaatttgcctatgctatgacttttcgaatttcctctggaattatcctggtgatcctaattttgctcttaatgtcttccatgtatgccccaaataattaacataacgaagataattttattgtaaggttttttgataacttatttttgtctttgttttcccctgaaatgagtgtccttcacctagtccttaagtgtcctatctacaaaatggagaatgaaaaaggctgccaacactgtaacataggtaggaggcattcgtgttttcagaatggagttgtaatgaatacacacacacagttcctgtcactgctgtgcacatgagggtgtcataaatggtccctgacctcaagacattagacctatggcaatatgggacatgatgctgtcattttgttagactattctaggcctattctacttcagtgtctagtgtagcattactgcagaccatgtgtttcagcagagtttgtggatcttgttttcccaatagctcccactgtaatagtggtgcaccccgctggcagcaggcagcttattgagaagatgtctccatgccttgctgggcactgcagcctacattaaactatccagattccattttcatatttttctgacttagagtcactttcccaactcagtgatctcctttctggcagcagcatcctgtacatcattaaattgttccttgttctagagggatggacgtactgagttcctgttaaaggtttgtctgctgtctagaactactccttctcatggtaaaagcccctaattttcttatggtgcccactttatcgtaagtccatataggtctgcagcttcctgaggtggctcatgaccagcttcgcccagaacctcagggattgggccagaaagggaagatgacctcattggaattattggccattgctctagcttttgcttgctggatttgaactgtagtcattttgctgtcacctgcctgggacccgagatagaccacacacctgtggaggcagagctgagagatggagaactgaattctgattttcctttttggaacctgaatccagtagtggttgaagttctattcctgaccttttgacttcctcagcacttttccctcccctctttagcttaagccaattggaattggtgcttctgtcatctgtcacttggaatagaaacaacccaagtgatacacaccaagtatctgtagtccaagttcaaaagaatttcactctttcattgttttagcctgggtttcccattaataaatcaagattgaaaaatcttccttcattcatggatgctggcatccaacaagcttattgttaagttaaaggcttcagattgtatgacaaattctcagccctatatattttctgagttctaaacatgatatcaagttaccttaaaatccagatatctacaagtcattgcttctaattaacatagaagctaccttaaaaaaaaacctgtacacacactaatatatatatatatacacacacacacacacacgtgtgtgtgtgtgtttgtgtgtttgtggagagagagagagacagagagagagtcatgtgccacaccatgatgtttccgtcatcgacagactgcatataccacagtggttccgtaagattataatgcagtatttttagtatacctttcccacgtttagatacacaaatactttccattgtgctgtaattgcctacagtattcagtatagtaccatgctgtacaggtttgtagcctaggagcaataggctccagcatacgctgtctaggtttgtgtaagcacacgctatgatgttcgcacaacatgaactcccctcacaatgaatttttcagaacataccctgtgagttaagccacaaatgactgtatacatatacacatatttctatgtgaatgtgtaacatgaatacgcatcataaacatatatgtgtgtgtattacatctttaaaatgactagaccagcaatatgtgattcctttcactcgttagacaaaacaaataaacaaaacacaaaacctcattgggcaatattgggaaataaatacatcaagggcagagaatttgatgtgatcaaagtccaaggtgctttggctgcaggcacagtagtaaggggggctgtttgtctcctttgaccccaaggtttcaagtaggccaatccacccacatgccctggggcagggtgccaaaaaaatgggcctctggcgctgcaccgccctccttcctgagctctgctttcacgcccattcttccttttgctcccgctctgctccagtcgggcctgatttctgagcagagtgacatgctctcctttctggtccatggattcagggatggactcgattgccagctttcaccctgaaagctctctggagtggtttgcccagctgtggccccctcacctggactgaccagctcctccccgctgttgacctccttcttgcaagaagggtgttgtttcaatgtgctttgcaagagtggggtggggtgaggaacaaggatgagataaaagagtgacaaaagagtagcagctagaaaaaggacaaaggtagtgtctacccacacatgtctttaccttatctaaaaatacttcccattggcaggcaggatgaagaagctgagcagatggcatatgcttcctagtgcaccagattgtaatattatacacttggattacaaagtctggatatcacagctataaacatatgtaaacatttttatgttttgctaaaaaggaaaaaaaaatcactgatgatgtattatcctaatgagctgattacgaagatttactaattatattcccaagatctagatagaaagaatggcactggctccagtgacataccgttcagattcagtagtatactggtatttttcattttcgtttggtttatcaccatttgctacagctgtgttttgcagattagaatcctaggactggaaagaacctttagatgaagaattggaaaacgaaggcctaccagccaaatccagcctgacaccttttgttgtaaataaagtttcactggggctgggcgtggtggctcatgcctgtaatattaactcttctagagggcgggaagattgtttgagcccagaggttcaagaccagcctgggcaacatggggagaccccatctctacaaaagtacaaaaattaggtgggcatggtggcatgtgcctgtagtatcagctacttgggaagctgaggtaggtggattgctcaagtccaggaggtcaaggctgcagtgagctgagatcacaccactgcactccagcctgggagacagagggagaccctgtctcaaaaataaataaataaataaataaataagttttattggaatccagccatgcccatttgtttaggtattgtcgatggctgctttcccactaccctagcagagatgaatacttgtgatagtgactgtgtggcctggaaagtgtaaagtattcactgtctggccctttagagaaaaaattgccaaatttgctttagaaggctatctaagatcatttggctgttttctggaatgcttgtattttgttgcctcagaaaagtgtttgcctagttaagatttctagggacgcacatggtattgtcttactaaacaaaaattcgttgtaaaaataacttacctaaatcttttataaaatagtgtaaacccaattcctctttcttttttttgagacagagtctcgctctgtcttctaggctggagtgcagtggcgtgatctcagctcactgcagcctgtgcctcccgggctcaagtgattctcatgcctcagcctcccgagtagctgggactacaggcatgtgccaccacgcctggctaaattttgtacttttagtagagacggagtttcaccatgttggccaggctggtctcgaactcttgtccttaagtgatctgcctgcttcagcctctcaaagtgctgggattacaggcgtgagccaccatgccaggcctcctctttcttaaaaataaaaacaaatctttaattcaattgtttttatttcagctgctcaatgaaagatttttacatatttaaagatgatcaaatgatctgatttttctttttttctccaccaaatatccatccctgtttaacattcccaaatcttgaaattttttttgtgtcttatctacaaaacctttttcatttcctgtagtgacaattctttatttactcaggtctacacattgtactctaatatttacctattataaagtgcatccaggtgtataatcagtttgcatcttaaaataccttatggtgccagcaagcatttgtattaggcccgttttgcagatgtggtacagcaaggtttcttgtctggtctgtgatcacacagccaggaattcataaaccttttttccagcataccagactgcattgtgatgagcctggcgggaggacacgaaacagttccaataagctatatggcatgtgtctgacccagtactgtgcttgctttggggaaaaatattctgtacatcactgtgtatctgctggcttactttcggctcaaagttgcacaaggagccagtgtgaccttggtacttggtccactgtttaaatactgccacggtactctgcagccacagcaaacaggttatgtgttagcagaagaactgggagagtgcggtgaaatgagcaaaaattcatccccggtaggagaaaaggtgtgtgtttcggaggaggaggatgttcaatggcatcatttttgtataaaaggacagtcttatctacgtatctgtctttaccgcattacgcataggcagcccatccccaccttgtgtgctgtgccatttatttcccctcatctgatgctctgagctattaagcaacagcaacaaagagatatctccttaatggtaacatattgtcctcagcaaagcccaaagattgcataggggcactgctgtggaaatatgaaaaaaaagttagtactgcacttttgggggtggatgttttccaacttatttattttagccttttagatgtttcttttgggaccaaattatagctctgatactatcattagcactttaaattattggttacagtgtataagggaaatacaagctgcttcttgaacattccgcatttttagttaaacagggtgtttccttttttggttgtatgttgcttgttgttcatccttatcatcacatgtgatcatggttcctatctgaacagatcatcttactaattgagtgtctgcagattgttgcagtttaagtatttatttttatttctaataatattacagaactggtcaatcacttgaagggtaaaccgcttttccttacacaaacagcaacaacttttccctccagtgtctttgtttctgaatcatagaattcctggtgattgtgttaggagcagaaagggcacgctttgactactgagaccctgggctatggttgagaaaggccagagaggaaattcctctttggatttgtaaacagacttgtaaacctaggacgttttatgaggacttcattaggagacaatagattcaggaccctgctgtcatttttttttatagtcagaattagagtgaaatgacactttaaaataataatttctcttttcttactctttctttcagtcttcctttcaaagctattttaaaaaaatgcattgtactttcctaaccttttctctagtttagtggccagctcttattttcatcttgtcagatttcttctcatccttttacgtctacagccaggaagcctcagtaaattactctcctggagtcacagctgctttcttcctttgagaaacaatattctctagctctcctttttctctttcctgtagagttatattcaacagatactatttccttgtctaagaagcagtcatctttgaattttgcagatttaatttcattctggtagcttcaaacttgaaaacacgatgagtgatctgatatatttatttccatccaagaatagcggtgcgtctttttcacagtgttggggcttggttgaggtcattcctttccatctgagctgatcatgtatcccatcggtgtgcactcacatattttagagttgttgaatgctcattgaatgcagggtaccattaaattttgcaggcttctttctaactgttatttatactccctgtgaaaacttcagttatttttgtgacagacattattttaaacggacagtggtgacagtgactatccattgattatttttattgaattgtcctcatgtgtacatattatggtccaacctttttaacatccttgttatgacttaatttccattgtccttatttagcttgaaaatttacattatttcaacgatttatattacttttgtttacttaattaaagccccctcttgctttgagttttctcaatgtcatactagagaacaaactagtacaggttcagagctcaggtaccagtgtctgagtgcctgtgtttaaactgcaccttgccaccaaactagttatatgacctgggcaggaaacacaggttctttgtgcctcatttccttttctctataatagtgataatcatatcacctaactcctaggctgttttatgattaaattagttaagtcatgtaatatgcctagaatggagtggcacacagcaaatgctccacagcggcagctattgtcttcatcttttattgttgtcacctggtgaggaccacatcagaaagtttatcctcaaaatctcttacaaaacctcatactagaagtgggtgctcaaaacaggtgtgaagtaacagtggtaggtagaaaaatgcactcccacccaagatgtcgacttccacttggaacctgtaaacatgttaggttgtgtggctagtgggaattaaggttggagatgggcttaaggtttctctcagctggttttgagattaaggagattatcctggatcttcctgtgggtctgatgtattcacaagggtcctttaaatgtgaaagagggagacagaagggtcagtttcagaaaaatgcaaagtgagaaagactcaacgggccattgctggccctgaagatgcaaggagaccaccagcccaggactgctggcagcctgtagaagctggaaaaggccaagaaatggaaaatggattctcttttccctagaatgcagccctgccaacaccttgattttttttttttttttttttttttttgagatggagtctcgctctgtcgcccaggctggagtgcagtggcgggatctcggctcactgcaagctccgcctcccgggttcacgccattctcctgcctcagcctcccaagtagctgggactacaggcgcccgccaccacgcccggctaattttttgtatttttagtagagacggggtttcaccgttttagccgggatggtctcgatctcctgacctcgtgatccgcccgcctcggcctcccaaagtgctgggattacaggcgtgagccaccgcgcccggccaacaccttgattttaccttgaacgatttcagacttcagacctccagaactgttgtataataagtttgtgttattttaagccaccaagtatatggtaatttgttgctgcagcaataagaaactgatatagtgaccgagtgaatgaaaatattagttgtttgagatcatgacactaaaaaagggcagattttcattatggtaatgacgtaatgtctggtaccatttcttaaagcagcagattctaaaccttcctcgatcagactcattcttttaaaataattcagtgcacaaaatcataaaatttaatggggcccataaacctcactgaagccctccattggccccaggttataactcttaagtttgcatgggatttttaaaggctcagtcagtggtgaggttttaatggtgagcataggaactttctggacagagcgatcttatgctttgaagttctaagtaaatgaaggctttgtgaatgctcatcaaagctacatggtaatttagagatctgtaccccttgttgttcagtcaaactgaaactttaaaattttcttttccatttctcatctactgtggcaatgtcatgtcccgtcacatgagccttctgtactcaccacttttaagaaagattttgcatcattagaataattaagttggtgttctaaaaagtgatttgaaagctaaagtaacattagcatgatggttatttttaataagccttttcccaaggtctcatttgttttagagctgtcacgaaaacaggtttttatctctgtatcaggaagtgtcaacatttagaggagatagcataggagggggtatgctgtctactggtacagttctattaattcatttagtaagtattgatctaaggccaacttagttccaggcatggtattagggatgagagatgccaatgatagagaaactggatgtagttttagtcctcaaggcacttatagtcttattctgatctttgttaaaaagcaaatacccatgcatccgacaaaggtctaatatccagaatctatggaacttaaacaaacaagcaaaaaaaacaaacaaccccatttaagaaaatgggcaaaggacatgagcagacacttctcaaaagaagacatacacacagccaacaagcatatgaagaaatgctcaacatcacaaaccattagagaaatataaatcaaaaccacaatgagataccatctcacaccagtcagaatggctgttattaaaaagtcaaaaaaacgagatgcttgtgaggtatgaagaaaagggaacacatacactgctgatgggagtgtaaatgagttcaactactgtggaaagcactttgaagatttctcaaagaacttactaataaaacagaactaccatttaaccaagcaaccctattactggatatataccccccaaaatataaatcattctaccataaagacacatgcaagcacatattcatcacagcactattcacaatagcaaagacatggaatcaatgtagatgtctatcaacagcaaactggataaagaaaatgtagtacatgtgcaccatggaatactatgtagccataaaaaagaatgaaatcatgtcctttgcagcaacatggatggagccggaggccattatcttaagtaaattcatacaggaactgacaaccaaataccgcatgttctcacttataagtgggagctaaacactgcatacacagacacaaagaagggaacaacaggcactgggccggcttgaaggtggagggtgggaggaggatgaggattcaaaaactacctattgggtactatgctcattacatgggtgacaaaataatctgtacaccaaacccccatgacacacagtttgtccgcggaacaaacctgtgcatgtatcccctgaacctaaaataaaagtcggacaggaaaaaataaaaagcagataccctctggaggtatggtttaaatgttgcagccattgtttactttctagcaaataggtttatcagatcttgtcttgaaataagcttccctggaggagaaaggagtttagaagtacaaggagagcctgaggggaagagtagaatttctgtgagaagataaaaggcatgataagtgtatactgaggccagtgagtaataccctcacttgtctcttggatttctccaatagtggatcctgactattcttacaagttcccctatagagtaattgacagtgagatcatcccaggcctggtttgaagcccatctttgtgactcagtaaatacattggttgtcctagtgtgtctggcatttcttgcagccctctgcatggaacttgccgtggccatttgcaaggttgctcctgtgcagtcagtgaagagctgccactacatgagttgtgatttcacacacaactgcaatatcttctcccttagcctggaccctagaagacctaggacattctccaactagatttgctgaaggactgaacgtgggagtgagatcagagacatgtattgtttcttgttgctgctataacaaattatctcaaatctaatagctaacataatacaaagttaccagcttgcacttatgtaaggtcagagttctcaaatgggttggcaaatgggttccttctaggggctctaagggagaatcaatttccttgccttttccagcttctaaaggctgaccatattccttggctcatggccccacatcaccctcacctctgcttctgtcatcacttctcttgactcctgcctcccttttataaagcctcttgtgattacattaggctcaccctggtaattcaagataatcatccaactcaaaatccttcatcatagctgcagagtcccctttgctgtgtaatgtaaggtattcagaggttccagggaagaggacatggacatctttagtgccattattctgcctaccccaaggtgccaaggatgacagtaccgaaacagctgaagtgctttctttgctaacagcctgccaaccaatacctaagctccacctagtttttggagctacacaaacctttataactccaggatggcccttttccattttccattataatgtatgagatagaaaatatttcaatgtgattagaattagcagtgtcttatctcacacttggctcagtgggaaaagttggtggaaagtgttagatttccaggctctgtgccttgcctttgcaggtctgtaaattcctcatcagattcctgatgtttcagtaactcctcatcccatgccttttaaagtgtgcttcaaaccgcatatttttggaggaatatgacataccttttcaacacgtgtttgtctaaagctattctgaagatttcagttttatgtcttcttagaagtcatcacaaaacttgatttttttttccagataacttcaaaagtctaatggaaaagagaaaggaaaaaatttaaagcatctcaatggagtaagtgcctttgccagaaacttttctgggttcctttctgtccaacatctaacctctaggctaaagcagacaggaaaggaggttgcagggttgagcctggaggcaggagatcagctctgagccaggagattaggcaatagagctggaggcctcagagccagacaaacagaagttccaaagccagataaatgagagatgcatataggagaccagtggacaaaggaggggttgaataatgcttgcagagtggacagctctcgcacatgaaaaattctagccatggtgtcatcctttgtacgtgcttccgaggggccaggaagtttaaaaggagcagaactatctttcctgctgcacggcacagcattgtgttatgtggtcctgcaagtctctgtcactccatcatctgaatctgtgtcacacactcatactttaatatgtattctctttttttttttttttttttttagaaggagtgtcactctgtcacccaggctggagtgcagtggtacgatctcggcttgctgcaacctccacctcccgggttcaagcgatttgcctgcctcagcctcccgagtagctgggactacaggcgtgtgccaccacgcccggctaatatttttgtatttttagtaaagatggggtttcactgtgttagccaggaaggtcttgatctcctgacctcaggatccgcctgccttggcctcccaaagtgctgggattacaggcgtgagccaccgcacccgcccatatatattctttatgaaattaaaacttcgggtctgttatgtgtattatcccctaatttcatgtcatcaggcagaccattaaatacttttgcatggggaatgatcatatgtaagtatgatctttaaaaatagcttatagaaataatatgtatttattcatttatttaacatatattgatcatgagctatgtgccatggattcttctaggcaccgagggtatggtagttaacaagacacataaatgtattgaggattgtctttaaggagcttatgttctagctgagagttacaacaacaacaaaaataggtacaatttagggaagaaaaaatggggcaaatatgaggatataaagtattaagaagggctgaatttgagataggatgatcagggagggccttcccaaggtggggacttttagcaaagcctaaattaaatgaggggactggttagtggatatctggggaaagaacatactaggtaggggaagagccaggacaaagaccctgaggtgggaacatgcctggagtgttcaaagaacagcaagagagccagagtggctggagaaaatgagcaaggcggggcagtagtcagaaggaagttggcgtgtgtgaggagagggtggttcatagatcttaggagatcgtgtaggtcacagcagaggctctgtcactctgagtgcatgggacatcactggaagcagctgaactggcaatgatgtgacctgacttttattttcatatgatcggtctggcctctgtatggagaagggactacaggaggcatgggcagaattaggtgcagcatttaggggactgttccaataatctcaaagggagatgattgctcaggccagagtgatggcagtgggagtgacatatgcttgaattttgaggggtttgaaggtagagctagaacaggatttgctgactgtctggacatgggggtgagagcatgtggaatcaggaataatcttaaagttgttgacctgagcaactgaagaatgaatagaggtgccattaactgagatggaaaagatgttaggagaagcaggtttggggaaatcatctatagttccactgggacatgttcagtttgatatgcccattagacgtgtcaaataggcagttggataaacagatctggaattcagaaaagatgtgctggctggagatatgaaattttacacacacacacccctcaacaagccatccactctcacactttctaaaaaatctgtcacattaattctagccttcattcaaccctacctttcatatcacctccctaccttggcctaagtctcaaagttcttacaaaaagctcttgtcccattggttcagggcttcttcccacattctgatctgattcctccagatcacatatcctggcctcagtgcttggattctcttgctgagcctggcctgggagttgcaaactcctctgcatagtgctcagagagttgaagtaattcagtgaggtggggagtttgggcaactgcagagcacatgccccacctaaagagggcagcactggtcccctcccacaaagtgctcctatcagggagagggacccattgttgcccgttcttctagttaagctagaaatctagatttttttaaaaaaatgcataatctgctaatttttagacattggcaactaactcaaacattttttcaagaccctgtgagccaaacaaaatatatctggggccagatccagcccgcaggcagccacccttttaccaatgatgatcccactgaatgggctgactggctggctttggcatttggcccttggatggagccaattgaggtatccaccttgggcttccctagtgcaggctgaggccatgaaccaccacaccctaggaaggctcttggggtacactgtcccctgagcctggcccccaaggacctgcttatctgaaaaggaggatgaggtgccttccccgggaactatttgaagagcatttggtcccctttccccttcaccccttccctccagtgttgtatctcacttcaaaagcagaatgagtattgactccatctcttaggtgagacaggtaggagctattgaatcagcacatctgacatctgtcttaaatgcttgatggtgaaaaagattgcaaaatcatagctgaatgacagtctgaggcagaaagctagtcttgggcaggtagaagaaactatatattttttcaacaattatttattgaatacctgctagggaccagttattttactatgtgctgtgtgtacagaaaaaagataaaatgccatctactcctatgagattcacagcctcttggaggagacaaatatgaaaagaaacaaatcatagcatcatgaaaagaaccacaggccagcaatgccacagaccaaagatgagggtggggggcggtggggagtgggagggctgtcaaacaaggtgtggtgttgcaggactttttctttcttcttctttttcttcttcttcttcctcttcttcttcttcttcttcgtcgtcgtcgtcgtcgtcttcgtcttcatcttcttctttcttctttcttcttccttcttccttcttccttcttcttccttctttcttcttctagtctcactgtgttacccagcctggagtgcggtgaggcaatctcagctcactgcaacctccacctgccaggtttaagtgattctcccacctcagcctcctgcacagctgggattacagatgcatgctaccacacccagctaatttttgtatttttagtagaaacagggtttcaccatgttggccaggctgatcttgacctcctgacctcaagggatcctcccgcctcggccttccaaagtgctgagattacaggtgtgagacacagtgcctggcctagactttttcttagttcagtcagagacggggttctttgtcccatggccatgaaaattcaggctcgcagacaatttgaatggtgactaaaacagggttttattgggtgaaaaggaagaaaaggggggaaacagggtctctcactaggccagagtccctgctagagtgcttcccacctggcctttggaatctcagtttccacatagaaagagtgggggccaggctcctccccaatgcaaactgtgcaaacttctcaaggttccaccccagtgtgcattcctcccagtgcacaggctggttagagattctctggggaccctctcccgcctggctgtctcagtggtagctgagccaagttttggaaaatgaaaaggagcctaccaggcagaccatggggggaaaccttctagaacatgggggcagttcaggaactctgtagtcttagtgagagtcacacttttccttaaagggtgaaggaaagggcaaagctgggcaggaggggagggagagagggtaggagagagtgccaggtagtaggtcctgaaggaacttgtccaggaggaggaaagacggcctcacagtttcccatctgctagatgggctagtggcaaactagagggctgagtggcaaacataattttagtttgagaggtaaataaacaaataaacaaaaatctcctttcttctcccaaaatttatgccaagaggagagccaccatccacctaggcaacttaagaagaaagtttgatgtaatcttcattaattacctagagatctcatgctatgcatataagatatggaacataatagtaatatcagacacttccatggtgtttaccatgtgcaaggcattgtcccaagggctctatacacaggtgcatttgtagaactcatttaattctcacaaccatcctatggttgtgtaactcatctatttctctttgtagttaagcgacttgcccaaatgtcatgtagcttataagtgacagaaacaggcatggaacctaggcaggctgcctctaaaggacatatatctatttctaccatgtcacaatcctcaccaaaggctttggaaggcagatagcaaacctccagcaaccagagactgtgctgctgtgtctgtataaaactatctctctggcgttgttgagagtaaaaattaaaagtgccaatcaccagagaccccaccttaattcaaagggcaatgggagctgcacattaactgtggctgccctctgcatactgctggctgtgatgtcaacactgtgtttatatgaaatccttcagccaatggcagcatctttaaggcatcagccgtttgcttgcagaatgggcttctcagttttttacgcattttttttttctttctagaactgggttcaggtggataggctctaaatagaataccatgccaatgccaattatattcagaaagtattgcaatttctctttgatgcttatttacattaattaagagcaaacttagataaagaagggtacaagtttaaatgctaaaatcctgaagtgagatactttatagtctggaaaaatatacagaactgactttccttctgaaaaaaaaaaaaaaaaaaaaaaaaaaggacaggaagaaaagtgaaagattcagatgacatttctatgaggaaagtggtaattgtgattctcagggtgaatgcttgtctttttatttcatgacaactttttttttttctggaaatgagctttaaactttccacacatgttaaaaaatattttcacgtgcagggaaacagattaattttattaataccttaattatttatataattgacaagcaagcatacaaataaatatcactgagggagatatttgtgaaaatttttaatggacatattttgtgttttctgtgagctgggttagttctattagaaatctattttaatctaatcagttaattactaagatgtaaatacggcatggggaggattttacttttcagaaaaataggactcaattttttcaatttttttaatgttatgggaaaactccaagaacaaaaaaagcaatcttttacaaatatgtgacttcttttgtttttatgtctcatttttcatagaacaattctattcctggcattttccacccaatttgagaccatcatagtccactgaatatagatgcccttcactttgggtcacaagtgtaatcctgaaaaattgtagaccagtcagagttttctaagttgaatcagctaaactgcatgcacttttttttccaaggggattctatgggaagtcctttggggaaatgaataaaaccatttatatgacaatatcttcatttgcctatttttacattcggattttaatctaccagtttattataaagtagggagtttatcatagtttattataattttactttgtgtatgttgtacagattttgaatgagaaggatcttaaaatactccagaagtttttttgcaaaatatttgcaggtaggtgctcatcactggttggggtgggacaaattagaagagacagacaaggagagtttcaccagcctcaaggctacagagggaaagagaatccaaaattcccacattcgttgttagcgttcttgccagtatatcctttcaatgttgaatacgtaatttaaataagtctgaaattaattacagtttatctccatcacaactctatttttagatgtcaaagtgcactcaagtcaaactaccagtcaagatcttgccgatctgaacattcagtgcctctctttttaaaaagaagttgcccctgtaacagcacactggattgttctattgttaacactaaggagggaacttcctgatttttttcttcatttttagttagtggtttctaaactaaaaaggaaacattgaatggtgcttagttttaagtctgtgggttaatgcattattttctctccccacacccactttcccctttcctcatcattatcttaagtgatgtgtttacttattgatgctctcgggctgtcatttccgagtctgggatttccccttctgcttttcagttgtaattttgatgagcagacaaggtggtatagagaacagatagaggtggccctgggtaacccctctcattggctggtgacagaatgtctaagaccatgaagcatacaatccacctcccacacagagggatgcaccaaccaagttactcttgtaagtgactgagtcctccctcagtcatttctgctattctctgtgggaatttcaaagcaagcatttttgtcttaaggcagcaaggtgagggcttcaaggctgataggtttcacctctaggggcagcgccgactatcggcagatactgaagctgtgcattgaggatggtgaggctggacctgcaccaccaggaaggagccccgatcgattagaaatgtctgccttgggtaaggaagaaggaagtggtgtacgtgcgcgccatatgttgtcatctccctggtactatgtgaacaccatatattgtcatctccctggtatggagcttacagatcttgactggtaatcaggaaactggggttttcatcccaattctgccataatgaccagtgtaacgttgagcaagttaaattcccttactttggtttcctggtcttttaaggaggcgtgaactctccctctatataaaccttctagacctcaaactctgtgatcccaggccccatcacctgtggctgtccattgttcatgagataagtactgaatcttcatcttggtctttagttctctcccagtgtgaccttacactactttttgggccgtgtcttcaatttcttattcatactggccaggccagattacctatggtttcttgaacatgccacacactttcctgtatcgatttcttcagtaaggtctctacctgcaatgccttctgtctttccctcttctctgcttattaaaatcctacctattttttattaagactctgcgcctcatagaatttcttctttatgggaactttattactttactatttattacagttgactgtggatttttcaagcggtccttaactaatctgtaaattcaaggtggataggatctgtgtttcaagcatccagtgtccgtggactctcttcaatgtctaatcaggctaacaaaaggtagtgaacatttctttaaagaggaaaacagaaaccagggaacaatgatagaattaaagtggcaagaagatacatttaagttagcacatacttagtatcttttgaatttgggcaaaacaaggtggtaggtacttcagtggggacaagtaagagtaagaaatagtctgttttcaaggagcttataacataataatgataatgataatattttccatttattttatgcatttttaaccacaccctttacgtgcattatgcattcctagaacaactctgcaaggtattatcatcactattttaccaataacaaagatgtagcccacagaatttaagggatttgcccaaagccacacagccagtacctggatgcctggcttgagaacctgagctaattacaggactgacattgcctccctggtggggactgtatgacaaggactagcagaaccctgtgcacacactcacgactttcacatttccacgcctttactccgctcttcaggccacttggaacacttctcttccacacctctcagcttgtggaattgcttcccatgcttcaaatacatcttggatatctccttgtcgaagcctttgctgctgggctcctgataaggaggggctctgtgcacataggcaaaatgaatgcattaatgccaacttcatcttcttttccattaggaaggctctaagggtgaggtaaggatatctaataaaatgtgacgagggaattttgtttcattcagcaaacatccatagagcacttggcaaagtcttggtagcataccaaggaagttgtgttaccaagaggaagacccctagtgtaaagcaactttcccctgctttctaaaagaggctgtggcaacacccatgatgacatcaacctgtaggatttatgctgcctggagagaattacttcttgtctcaggcagaaccggagaggttcccagagatctcttgtctctttcctggtcctgctccacgtggctgggagggttgggggtaggtgggcactgatgtggagtggacagtctcagagggacttatttgctggtagttgctaaaccagaatagtcttctggaagaccatcagaacttcttccctccttgtttccaaggagtgaagggtcaaagtaaagccattattggcatagtttctattcattgatttccctgttagtaagtgatgggtttgaaatgtgatccatatggctcacaggggccattgagcacctgcttgcaggtgctatggagtcaaaggtaaacaaggcacatccatggctgaaaggtagctcacataacttaagtacgtgtcttagtccattcagactgctataacagaataccctaaactaggtggcttataaacaacagaaatttacttctcacagttctggaggccaggaaggccaggatcagggcacctgcagatttagtgtctgatgagagccttcttcctcatagatggtgccttttcactgtgcccgcacatggtggaagggatgagggagctctctggggctgcttttataggcactaatcctgtaatgaagggccagctctcatgaactaaacaccttacaagggccccgcctcctagtactattaccttgggggttaggatttggcagacacacaaacactcagtccgtagcagtgtagagtggcatgtatcatgtgggggtcataatggaggtgtgtaccttgtattgtatgagatcagaggaggctgtagggtctgttgagcctgggagtgtcagagtatttcatggaagtgttggcatctttgcctggatttgaaagatggatgggatttcatcaggctgagaaggtgggataggagggcactccaggtagagggaacagcaagtgcagagataagagtagggagagcggtttggcatctgagcttggggactgagatcagaggcatagtaagaatcacaaattttggatttctgtttcaaatattactgatgtttatgtgatcacacagtgacccaaggttgccagaacagacatttcctccctgccacatgtgtcacacaggcctggctgcctcctttcacccctctccggcactcagggaagtggctgcccacaccctccacagaatcaggtgcccatttgccccagggccacatgcttcccccagccttctgcccacagccctccttgacctgcttcctgagctcagcttgccagagactgcctcagtgccccagcattgtttactgtctgtgcagtggctaagaaggggccagaatttatttgttctttccccttgcaaagattgtcagctcctgggtgacagaaaacaaaacaaaatacgcaaaaaagcctcaccgccccgatggtgcctcacgaaccctgccctttcacagccagccttgaccttggtggtatcaccgcctgatccactgggaaaggagctgttctgttatttcctctgccagctttctctttccatggctttgctttccaattaaaaacacaacaaagcaaaacaacaatcatgcaacccccaaatcctctctgctctttatcctcaggtggtcagtgtttatactgtttttgattttagttgagtcatcatttttatagaaacagcatcattgcatgtgaaaccatgtgctttctctgccttgttcaggcagtgatgccagagtaggccagtccaccatgtctgtaagagcagagctcagagaccaaccagctggcagtgggtttgaggagggctggagggcgtctggggcttggaaagtaggccctgtcccttgcagcgaagcacagacattagatgtgatctgactgtgttgcaggtgatgggaacaagtctggccaggcagttgaaagtgtgggccagagcgtctggagagaaagtactagagcaggcagtggtcctagcagctggtggcaatatcaggaagaagtgacatgtgctatcggaccagagacctgagctctagactggcagccacatgggacactggttcttgcagtcagacctgccttcagcctgctcccttgccaacctgcgaccctagtcttcctccagctcattaaccaagtctcccaccctgttgtctgcagctttcagttcttcctcttaacttctgctgttgtgacgttagtttgggccctgcgtctcacccggatggccatgatcaacctgctgatgaattccctgcctggagtctcctcatcaggtctgcctttaggccactgccaggtgtcattccccaaaacacagttctgatcgtgtcatcgcactatccgcagagctctggtggttccctccctcttaagcctggcatttcaaggcctcagtcttctctgcctctcttgtgctctgaatatttcctgtagattcttacttttttcccagtgcttcaaacctgaaccctcagcagcatctactggggaaacgaaacatacgattctcaggctctactttgagagacacacaccagtaagttgggtgctggaacctgaatacttcatgttttaagctctggccatgtgactctggagatgagccgggcttagaatcctgtgtctctgtcatgccattcctgtaccctgtgtgccctctctcatcaccaggcctatctgttcttcttgttccagatcagttgttacttcctcttgaggagttctgtgattccagtagtcaaaaacaagttcttcttttgcccctgttttggtcagggttctctaaagagacagactcaatatgatagctagctagctggatagatatagagacaggagaggtgatttatttgggggattggctcttgtggttatagaggccgagaagccccatgacagcccatctgcaagctggagactctggcatgctggtagcatggctcagtccaagtccaaaggcctcagagccagggatgccgatggcataactctcagtttgaggccaaaggcctgagaaccggcggggctgctggtgtaagttccggagtccaaaagccagggagcctgggcttattgttcaaggacaggagaggaagagtgtgtcccagctccagcagacagatggacacattcaccttttctctgtttttgttctttccagacccccagctggttggatggtgcctgcccacatggagggccgatcatccccacctaacccactcagactcacatgacaacgtcctctagaaacaccttcacagacactcccaaaataatgctttactaggtttcttttctaagtgttctttaaccaggcaagttgacacctaaccgtcacaacccgctaggttgtcctgcggcctttctgctctaagccatttgtctttttcctgctggattacaggttatttgagtgtagagaatgtattcatccacgtgtatcttgcagcttccaggaaagcaacttaagcttaatagccgctccaatgtgaaagatattatggaataaattgtcaaaaaagacagatattacatttacttttgtgatagtttacatctataaggaaaaaataggaaagacttttcaggaatggtagcgacatgaataccaataaccaattccattctttaaaaatttaaaaatgtgaatttaaacaagtggcaattttagttgtaaaaccatatgtaagaattaccttttcttctactctcttgcctggtgaagagagtctaaggcttctgaatatatctgcattgccaagaccttaccgacttaaccatatttagcacaacatgtgattttattgttcatctgcaactatgttgtctgttatatttgcttctgttcactaccagagacatcagttagctcagatttctattaacaggcataatgtcatggcactccctgggatgaaagaaagagagcaggaattagccatttgtagcttttacagcaccacctttatcaatatattcccatttaaaaatatccttttatctgcattgcaaaaatgaaattatatagccattaccaaaattagataggagattcattggatcagaagtgctttctttctaatccttaaatgaccaaagggttcttctttgataattctataacagagttaaaattccttttatcctgaaatgttacagataggagattaacctagttatgcttcacccatgtaaggagtgcatgtctcacagaatcaggcaacagcaacagaggtgtctgatgtaggaaggtacagaagacatgagactttcatgaattataacatgactccttaaataatacaaaagtactttacaaataattagactattttagactaggaactctgatttccggttaaaccttaagttgcttcctacttgttgatgtgtaataatgtacatggagcaccacacctagtaagaagactcttccctttttttacctgaacttcttctttttttttttttttttgaggcagagtcttcctctgtcacccaggctggagtacagtggcacagtcttggctcactgcaacctctgcttccagggttcaagcgattctcctgcctcagcctctcaagcagctgggattacaggcacccgccaccatgccaggctaattttgtatttttactagagacgagctttcaccgtgttagccaggctggtctcgaactcctgacttcaggtgatccacccgcctcagcctcccaaagtggtgggattacaggcatgagccactgcacccagcttgcctgaacttctttacaatttagtaatattttgatcacttattaattatgggcaaggatggcaaaattgaatagaaatactaaagttaatcagtaaacatttgttatatatctaccatgcaggatgttttgcaagggattatgatttaaaataaaataccagaccaggcatgtggctcaggcctgcaattccagccctttgaggggccaaggctggcggatcgcttgagcccagcagttcgagatcagcctgggcaacactgcaaaatcctgtctctacaagaaaatacaaaagttagctgggtgtggtgacatgtgcctgttgtcccacctacttaggaggctgaggtgggaggatctcttgagcctgggaggtcaagactgcagtgagccgtgatcatgccgctgcatttcagcctgggcaacagagcaagattctgtctgaaaaaaataaaataaaataacataaaataaaataaataaaatacctgccttctaataagattactttttagtgttgttatagggatgagatatatatcaagcaccgaacatggtgagtactgaataaatgcgaggcagtgttttcaaggtaacttcgtgtaactaacacttacacagaatttcagagagaataagataattcagacatattagtaatatttgataaacagagatttcactctttcctcaacatagtgttctgagattgaaatgaagagaaatatgtcagtacatgaaaactgtgagtgtttactttcaactgtgaaaacgaagccagatttggaactagtaaggtattcatcacaaaaatagaacctaattatatgtaattgaagatagggcttgatgcatggcacttattttagagattcaaacatgtaaaataagggtgacagtggtttttgaaggtgctttaaattttatatccatctcaaaaatcttacacatgctatatatacttaaatagaccaaattcattctcattaacccacaaacagcaatagaaaggctctgggctaggagagaaactgaggtttaggtaaaaattttgccactgtggcaagttgaataatgtccccccaaatttatgtccatccagaaccttagaatgtgatcttgtgatctcattatgcaaattgggcataataaaacctaccacataagattatacaggattttttttttttttttttttttagacagtcttgctctgttgcccaggccggagtgcagtggtgccatctcagctcactgcaacctccaccttccaggttcacgagattcttctgcctcagcctcccgagtagctgggactacaggcacccgccaccatgcccagtgaattttatgtatttttagtagagatggagtttcaccgtgttagccaggatggtctcaaactcctgacctcatgatctgccagcttcagcctcccaaagtgctgggattacaggcgcaagccactgcacccggccgattatacaggattacacgagatagtctgtaagtacttggtacatgcacagttggtatttatttgctgtttgtctaaaattgcattctttgttttttttttttttttttttttttttttgagacggagtctcgctctgtcgcccaggccagactgcggactgcagtggcgcaatctcggctcactgcaagctccgcttcccgggttcacgccattctcctgcctcagcctcccgagtagctgggactacaggcgcccgccaccgcgcccggctaattttttgtatttttagtagagacggggtttcaccttgttagccaggatggtctcaatctcctgacctcatgatccacccgcctcggcctcccaaagtgctgggattacaggcgtgagccaccgcgcccggccctctaaaattgcattcttatgcatcttatagagagtgagatttcagtttaaggagaagaaaaaatattttctacaggaccatccaaacatgtaagtggcttctcatgggacagtttcccatcacgggaaagatataagtcgattcttagtcatccagagtgttgaagacagtgtatcagttagagactgagtttcagtccctgtccaacagcaactcaactataggggcttcatcaaatagggattcccaagaaagttttcacataataagatgtgctgagttgtgtcttcaaggctggtgtagaagcctcctgatgccatcagggacccaggcttcttctctcttccggcctgtcatccttatatgtggcattcatccatgctgcctgaagatggctgccctacctacagcctcacttgctcattccagcagaaagaagtgtcaaggaggaagaggtggctcatgttgacaaagcaaaacttttccagaaatcctcagcacattcagctgaattcttattggacagaactgggtcacatgaccactaataaatgtgagagtctgggaaatttagtttttagctggattcagtggtgctctgaacaaactaggcattctgtttgtgaggaagcagggaattatggatttggggtaggaaactagcagcatctgctataaaagggactctggaataggtgggagattgggctagatgagccttccaactataggattcaaagatgaacttaatagatttcctaccctcaaagcattgacagtttatattggaggcagcttttagagtcaactatgtgaatttaaattcagttttatcccttactaggtataaaattctggtcatgggcaagctatttatcctctctgaaccttagttccttcaactgtaaaataaggatgatggtgtctgttattttgataattatatgagttaaatatttaaagtgtcaattatactgtttggtaggagtagatgctaaataaatgtagctattttttttttcttttcgagacggagtcttgctctgtcgcccaggctggagtgcagtggcatgatctcggctcactgcaacctctgcctcccagggtcaagcgattctcctgcctcagcctcctgagtagttgagattacaggcctgcgccactgcgcccagctgatttttgtatttttagtagagacgggttttcaccttgttggtcaggctggtttcgaactcctgacctcgtgatccatctgccttggcctcccaaagtgctgggattacaggcgtgaaccaccacacccagccgctattctttttctactagatgataagctctatgaaggcaggaactgtgtcttatatgtgtaccatggtcatctcagcacctggtacacagtacccctgtaatagatctttgttaagtgaattaatggaggagactagtgctaatgctagtctataaagctgatataaaacatattcaaagtaactgagacttgccttttctcaagtgaaatttgaggcatgtatctcaagcacgttctgtaacaatgaggaggagatactacattaaggattaaaaaacctaaggtataaggtaagaagttgttttgattaatgttgttagttgcagacaacagaagccgctctaaggagtttaagcagaaaatgacttatgacagggttttagggaccttagagaaccacgactgctccagtagtaactcccttgtcaccaccactcacacccagcattggttaccggggactggacatgagaatctctgcgagctgccccagaaaaatcacacatactaggtctctaggaggggccaatctctctgtacagccactgcttggcaccgtctcctttcaaatgtcatgtaaatgtgtctgctcctcagagcctgggtcacatttagacttgttgtgcaagggagtctgggaaatgtagtttttagctttccagtttctgtagttcaagcaggtttgcttaaaggagattggtcagagtgctcaactagcaacaccctgtctagcacagaagtcattctgagcaacggcatgcagttgtcctaccaagagagcgtgcaggtcatagagtggtgagaccactgggaggaggtactggaagaccaggggaacacaggaaagagttcaggtccatttacaccaggagcctgccagacaggcacccaagaatggacagtgggttactgatggtcatagagaggggcagaagaggagaggggtggaagtaattttccctggacatgcccggtggattgtgtgcagagggagacctgcttctgcatttccctttgcctggtcactgtctcaggcactcagtttcagacaggcatgtggctccagggaaggccatcgagctcacttcagagcccagccagccccatcccggcagagtcaggatgacaaaggcagggctcctgtggcctggcccatgtgacccccagccagtcctaaatcttggggcgtgggaaggaataatcacgaggcaaggaggagacggaacaccctccacactgagaagcctttgttagaaccttccagccatgaggtcagaggaagaagctgagtgatctcttaaaaaaatatgtatatatatattagttgggggttttctttttctcttgtctttcttttcaatctaggtttgtgttttatagactgtgtgatacaggcaatgggacaactgggcagttagttggaactgaccttgcagacagccaagacggcaagctgggtgactcaagttcagaatgggttttttataaaaacaaacaaacagccatgattgatgtctcccttctcatcttttatatatccttttttatgggcagttgtggagaattggactggtttactgacatcatttctctctttgcaggctgatttcatcttagtcctttacacaggtataccttctgtaaggacagaatctatcaatgcaacttgcagtatgcaaaaaccattatctagaaactgattcagtttaatgctattaaatgcaatcagaagttaccaagcctcttactggaatgctcttccaaatgtaacttaatccaatttacctttcctttggtatttaagttcctgacagccagagcagacatttctcagacaagagtgatttgacttgtaacacatgccttttttctttcttttcgttcatttcatgtaaacaattaggtgtgatgttacagtgagctttcacctttaggttgtggtcagctctagacccagtgagaggctgccatgtcataaacttgatttaaatgccatgggtgtgccaggtgtttttgggtgaatgaatgagacatatgccctcaagccccagataacttctcagtctatttcagaatcactgaatcatgtgacagtatgagaacactttatctctaataaagctggagtgtaatgactcattctcacatagttttaatgtttatcgatttcaagtgttctttcttgataagaaaaggtttgtatgtgaacattcgaaagaagagcaacgggcattttttgttctttcaattttaacacaagtacaatattttaacctttaccttgtgatttttgggtgtatgcagtgcagcttgcctataggtgatttagttgttcgtttctgacctcattacaaagaagtggtggaagctgggtggatcttttcattccccagtatattctgccagaagctggtgctcatggatcatttgttcaaggacttaaagttcaatttctagtcaaggtaaattatggctacatcaggctggtctggcacaggtgatctcgatgatcttctgaaagctgtccatgtgggctccagggtagggaacctagaggaacttaggcaggccagggagccaattctatagtatttgaggaggaaccgatcgcccccccaccacgatccaaacctacctacagggccctctgttaaccaaagaccttgtattagcaaggagttctggctgaaaattccttttgtcattgggggaaacaaaccctaagcaatgtatgtgatactttcttggagcccaggccatctgggtagcatgagttttctttaaatacatcccgagtaaggcaatagatttccttcagagcatttggcaattaagactggggctgtcaactaggcttactgttaaaaacctgccctgctttcccaggctgcctggtctgaaattcagatgcctccaccagaaaataggtttactcacccattgtcttggccaccatcttccttgaccacacctgagtaccgtgaatgaccaccaaccctcactgaggccatttgccagatggctctaagtgtggtccatcctagccctggtttccatttggcttggtcacaccactgtgtcctatatgtgtctttcaatcgccacttcagtggcctgcggtcatctcaatacagcacatgtattaaaaaaaccaagcccagggagtatctcacagcagtttggtggtcttcacttcttccatatgccagtgtcagcaactctgctgtccctgttccttgggcacaactgttctgactgctccctctcctccaccatcccttcatcttttctcctttccactcctccacatatcccagcacctaggttacagctctaatctcttgggccctggagaattataactgaaaagatgtttttgcatccaatccattgtcttctttttacacatgaggaaatggcagcttcagagaggttagacaaatgaccctgctctaaactagttgaagcagagtcaggccttctgtccttcctcctgctactcggcctggcgatatcctgctctccctatttccagcctctcttcttttatccattctgtacactcaagtatgcagatttatctgcttttgtttttgtttttgagacggggtctcactctgtcactcaggctggagtgcagtggtgtgatctcagctcactgcagcttcgacctcttgggccccagtgatcctcccaccttagcctccagagtagctgggactacaggcacgtgccaccacccctggctaattttttttttctagagatagggtcttgccgtgttgcccaggttagtctcaaacacctggggtcaagtgatcctcctgccttggcctcccgaagtattgggattacaggtgtgagccattgcgcccagcccctcagatttatcttgatgaaatactactttcatctctctctcttgcctacagatttttggtggtccctatagctaggacaaccaactatgtaattgtcatccaaactgggtctcttgagagtgaaggagttgctagagcaacagggataaaccaggattatcctgggaaaaccaggacatctggataccctttatatagcctaagtcttaaagattagatgatcccttatggaatttaaggttttctacaatcaggcctcaaactacacttctaagctttgtgctcaagagtctacacaatattttgtttggtccagtcaatttgctcatccttcttggctcactttctgactatttctgctttgggatctggaagtgtttctctgctcgcctcatcttctgttttctccacggcctgttaattcccttttcttccataaagtctaagtctgttgcatctcccagaatgtctagctcctccaaagttgtgcacttgctatctgtactactaatttgacacttctgagtagtgaaatgaagtgtttttattcttttgaagtagtgaggacacagcttctgattattccttctataaatatgcctgctacaaaagcgtgagacccacaaaataacagagataaaaacataaaatgagcaaaactttcaaaagagaaatcagaactttattttactgatgagtgtgtagaacttagaactgtacaacctctgcaaagaggaatttggcatcatctaacagaagtacacatgcaatcccacttccatctttctatctttacaagtgtgaaatagcatatgtattaggttattgcctgtgccattattgtaatcccaaaaggttgtaaacaccaaatgtccagcaatagggaactagtagaatatagactgtggtgtagcacatagtggagtactatgtagcttaaaaaaaaaaaaaaaaagaatgggccatgttcagtggctcatgcctgtaatcccaacactttgggaggcggaggcatgcagatcacttgaacccaggcgtttgagaccagcctgggtaacatggtgaaactgcaactctgcaaaaaatacaaaaattagctggacatgggggtgtgcccctgtagtcttagctactcaggaggctgaggtgggagaattacttgagcctgaagttcaaggctgtagtgagccaagattgtgccactgccctccagcctgggtgacggactgagaccttgtctcaaaaaaaaaacccaaacaaacaaacatacaaacaaaacccaaaaccaaagaagaaggaagatctctatgtgtgagtgtggagagatctgtaggatatagagaagagagcaaggtgcaagaagattggatattgggtgctccgttttgtgtaaaatagggtgtggtaagaatgtgtgtgtgtatattcattatatattcactatataatatatatacatatgtcatatgtatacacatcttttatattggtactatttgcaaaaagaagttggtacaaacttcagttataagataaataaattctggggacctaacatatagcatggtgactataattaatactgtattgtatacttgaaatttgccaaaagagtagatcttaagtggcctcactctcccaccacacacacagcaatggaaacaaagtgtggtgaggatgtgttaattaatttggttgtggtaataatttcgctatgtatacatatatcaaattgtcacatcatacatcttgaatatatggaatttgtatttgtcagttataccttagtatagctggaaggaaaacagtggaaatatagatggaaactaatgaaaaatgattacccctagaggccggagtggaggtcagacttttctatgtagattcttctatctaattttttttcttttgagatggagtcttgctctgttgcccagcttggagtgcagtggtgcgatcttggctcactgcaacctctgcctcccagggtcaagcgattctcctgcctcagcctcccaagtagctggaattacaggcacccaccatcatgcccggctaatttttgtatttttgtagagacggggtttcaccatgttggccaggctggtcttgaactcctgacctcaggtgatctgcccatcttggcctcccaaagtgctgggattacaggtatgagccaccgcacctggatcttctatctaacttcggatttgagtcatgtcagtgcattatccattaaaaaataaaatatcaggtactttattttataaaattctttgtaaagtagcgtacatgtgattaattttgtcatctctcattggcagtattttcatttgcggaactgggtaaccttctggagaggagcatcagaggtgtgcttcagaaagctttttgggccactgagtgaaggtccattgcagtgaggaggggggaatctggagaaggggtggccatggtggggcgagggaaaggtgcagaaaaagtgcccagggcttccaccttccagccctggatgtagctctgccagccgggatcccttataagaagcttccttatgggtcagctattttctgactccatagctcagtgtttcctcttactacctttagccttcacgattttggagtacatttttcaggtgaatattttattcagcagtgtgattttccagcctgctaattctggacaccggacctgttttatgaggtggtgtctgtggtagtttctcccaatagcagaggaaagaaatcctttgttgccctcatcacgtttcatctcattctgacacatgtaattcacagctctttgagaatgtcatttagaaataatccccaattcataagccactttgcaattgtattgtattttctttctaatatactttgacccttttgatggggaaattagaacatgattttttaatgcagatttgggaatgacctattcaaagagaaactctgaaggtgataatgatacccccccacctacttttcagtcataatagatatccttcatcaagtgtcttcaggaattctctatccagctagctatttactttttcttgtgttttatgtattatctcctattattctccaaacaactcttttacagaatggggaaggacatggaggctcagagaggttagtaacttgcttgaggccatgcagcctacttaatgaccggcggagggggttggtgtttgcactgtatccattgcctccctaacttggccaagctctgtcatttccctgtctgctagtaccttccacttcatctccaaacccattgagagcagttggcggttatcttcacctcccctgctaggacgctgggatttcctccagcagggccctgtctcaggtgttccttcttagaaccttgagctcctgcttaccaccctaaggaccacaagtatttctctagcccacacacgttgtctggagtatctatccaaatgtacaataatttattttctcttgaaaacattatccctcagaatttaggactttgccttatactggaatccttacaaaggtcttttgccttaactagaactatagttcacttctttgaaccacagaaaatatttgggcagaacacattactgaaattacttcaaataaataccagcattggatgctcatagaggtcacctaatggaatgactttaaaaaggaaggaaatctgcacagtttagtggttatatatgggctctgccctcacaaaattgtatgttagatatcgttatacacaaaccttttaaaattagattattttaaagagcaataaagtaagtggtgcaccaggcgtggtgggttacacctgtaatccaagcactttgggaggctgaggcaggcagatcacttgaggtcaggagttcaagaccagcctggccaacatggtgaaacttcatctctacaaaacatacaaaaattagccaggcatggtggcgtgagcctgtaatcccagctactcgggaggctgaggcaggagaatcgcttgaatctggaaggcagaggttgcagtgagccaagattgtgccactgtattccagcctgggtgacagagccagactcagcctcaaaaaacaaacaacaaccaaaaaaacaactttctatctaactgcacagaaggtctcttctgtgtatcacagtactagtttgataagatacttagaaggaaaacttcaggtatttggaattagcaccatgtagaatatttcatatcacaaatacacatagttgttcttaacacatgtcaaagaaagtgttaaccttgctttgtgtcacttacaaaagtaacccttgtggttaatactttaaactatttctctatactaggctaaactaaagagagtgtattaaagagagttaaattatatcaggattagagtgtcaatttagatgataaagatctttctttgaaatcagtagagagaatagattaaatataattgttttctttgtgttgacttcattcaattctctaatccttttcttctttaactaattgtttctcttacttttgtcaattaaagtgaaccttccttactaaaaagaaactagattttaatgggtgtagactttcagttttgcaaaagagaaacaattctgaagatggatggtggtgatggttttacaacagtgtgaatgtgattaatgccactgactgtatacttgaaaatggtgaagatgggggtgcagggggagggagggcatcaggaaaaccagctaatatatgtcaggcttaatacctaggtgatgatgggttgacaggtgcagcaaaccaccgtggcacacgtttacctatgtaataaacctgcacatcctgcacatataccccggaacttaaaataaatcgtgaagatggtaaaatttatgttatatgtattttaccacaatttaaaataagaatcccttctcccctctcccctctccccctcccctttgcacggtcctcgtctcccctttgcatggtctccctctgatgccgagccgaggctggactgtactgccgccatctcggctcactgcagcctccctgcctgactctcctgcctcagcctgccgagtgcctgggattgcaggcacgcgccgccacgcctgactggttttcgtattttttggtggagacggggtttcgccgtgttggccgggctggtctccagctcctgactgcgagtggtctgcccgcctcggcctcccgaggtgccgggattgcagacggagtctcgctcactcagtgctcaatgttgcccaggctggagtgcagtggcgtgatctcggatcgctacaacctccacctcccagccgcctgccttggcctcccaaggtgctgagattgcagcctctgcccggccgccaccccgtataggaagtgaggagcgtctctgcctggccgcccatcgtctgggatgtgaggagcccctctgcctggccgcccagtccgggaagtgaggagcgcctctttccagccgccaccctgtctaggaagtgaggagcgtctctgcctcgctgcccattatctgggatgtgaggagcccctctgcccggccgcccagtatgggaagtgaggagcgcctcttcccggccgtcatcccgtctaggaagtgaggagtgtctctgcccggccgcccatcatctgggatgtggggagcgcctctgccccgccgccccatctgagatgtgaagagtgcctctgcccggctgcgaccccgtctgggaggtgaggggcgtctctgaccggccgcctcgtctgagaagtgaggagcccctccgcccggcagccgccccatctgggaagtgaggagcgtctccgcccggcagcctccctgtccgggagctggggggcagcccccgcccggccagccgccccgtctgggaggtgggggggcagcccccgcccagccagccgccccatccgggagctggggggcaggccccgggtggggggtggggggcagcccccatccggccgccgccccgtccgggaggtggggggcgcctctgcctggctgccccgtctgggaagtgaggagcccctctgcccggccgccaccccgtctgggaggtggggggccccctctgcctggccgccctgtctgggaagtgaggagcccctctgcccggccaccaccccgtctgggaggtggggggcccctctgcccagcagccccgtctgggaagtgaggagcccctctgcccggccgtaaccccgtctgggaggtgtacccaacagctcattgagagcgggccatgatgacaatggcggttttgtggaatagaaaagggagaaatgtggggaaaagaaagagagatcagattgttattgtgtctgtgtagaaagaagtagacctgggagactccattttgttctgtactaggaaaaattcttctgccttgggatgctattaatctatgaccttacgcccaaccccgtgctctctgaaacatgtgctgtgtccactaagggttgaatggattaagggcggtgcaagttgtgctttgttgaacagatgcttgaaggcagcatactcgttaagggtcatcaccactccctaatctcaactacccagggacacaaacactgcggaaggcggcagggccctctgcctgggaaaaccagagacctttgttcacgtttgtctgctgaccttccctccactattgtcctatgaccctgccaagtccccctctccgagagacacccggggtgatcaataaatactaaaaggggaaaaaaaaaaaaagaatttaaaaattaaaaaagtcaattgactgttaaaagcaaaaaaaaaaaaacaagttaatttaggtagagtaaatcattagactttttaaaggagatctgttatttcttagcaaaaatttaatctattgggaaatgatctcagaactaaccatttctctgaaatcatagtgaaatcaggagtgtagaaagtatccattgtggagcctttgggcaactttatgttgagtaaatgggggacgtgcttttagagtctagagactttgaaggaatagggacggcatcatgggctgcccttctgtggtgtctctggctatttcccagcacagtccacaacgctgcccctattccttcaacttctcctgactctagaagcaacttcaagtttccagaaagctccaagttgcctcctgactgtgcagtctccccatttcctcagcacgctcttggtttcctgcctggcttccttactctctgattactcattggatttgctatctgatctgttgccaaagaacagggcacaacttccactcgctctgctagacttagactggccaaacccactctcttgaaacctctggaaacctcgtgctcttttgagtttgacttctgcctccttaaggcccctgaagctgagcaggctgtgaatgaattaacagagctttgtaaattgcttaagagatgtgggtagacaatagggactcctggagtgaagacagaatgactgaaatagaaactttctgtggttagcatggatgtacctgcctttgtcactccccgaataaagttctttactttcttggaggcaggaggcaggcttgagagagacatgagagaagagggctctctctctggtttcggaaagcagtgggctggcatgtagggaggagaatccttgggcctggttggtgagtgacagctgaggaggaaaggctgttgatgtcagctactgtagtacagagagcatcctctgtcttgatggatgagcgtaacaacaaggaaaaggcccatgaagtctgttttaaaaggtaaaaatttgactgtcacatgagtgaagagtcacctcaagaagacccagtacagtaagctgagcactgtgacttgtgcctgtagtctcagctactcagtaggctgatgtgagaggatgaaaagttcaaggcctgagcaaagtagcaagaccccatcttccccccaaaaaagatccaacttagatattagtcctgccattggcagtgagacatcctgcccgaatggctgtcaaagatgtgtgtaaaatgtgtgtgtgttccccaaaacaaaccacatacttccagtatgagggcgccaagaagagtttcctaggaaactggaacaccattgggccttcctcactaggcattcaccagagggcctggtccagagtataaagtcttgataaatacttctttcttctgtaactcctccctcctccctcttcttcattccgtcaacaccgacaaagggtctaaggaatgggtgatccaataagacgtgaaacaggagatggtattaccttctaataggaagagtatatttcctaaaccacagactaaccatcttttctgccagagagaccagcaacagcttttgtcggtcaattacaaggctgtggtctttgtaattgttattctaatgtgtcgcaagatggtgtgaggaaattcaggtgggatctagcatttattgatcgtttatgagcaagagattgtgtttcaagtgttaaatgcattatttaatgttaacaggccccctatcatggcaggcatgaccccatttgacagtcgagggaactgagatttggaaaggactatgatttacccagggtcatccagccagggaaagtggagcaagattttgaaactcaggtccactccctgattctttccactgtagtgcattttccacaggagtggcagataggttctgagcactgcctgcctttctccttgctgccatcccttcgtatccaaactaggtccagacctccttccaggaagcctccacctcttctagtcgagaaacctagccagaaacctaggctgggcctctgtctcctcttttggaagagcacagatgaagtgcaattggcccttctccctcctcaaggtgagaagccaaggacactttgtgtctgaagtcttttaatggaaagaatcaatatgggtccaatccctcctttccctttgatgcttttttacctgtctcaagccccacccacccctctgctgtagtagctcttagaactttttactccgtgggcatttgcctggagtgccttgtgacctctcctgcattctccccagcaggcatgtcatccaatgcacaacgctgtatctttatgggacaactcagcgccctctgtacattaggcactaagtgcatatttcttttttttttttttaatttttttgagacagagtctccctctgttgcccaggctggagtgcagtggtgtgatcttggctcactgcaacctctgcctcctgggttcaagtgtttctcctacctcagcctcccaagtaggtgggattacagttgcctgccaccacacctggctaattttttgtatttttagtagagacagggtttcaccatgttagccaggctggtctcgaactctgacctcaagtgaccctcccaccttggcctcccaaagtgctgggagtacaggcgtgagtcaccatgcccggcctaagtgcatatttttctgtggcttattaaagcatacaaaaggccacctacttttccacagagaagagtttgatggagtgaatcctaaaacccagaacaaggcactaatacccttttgaattttctccagttttccattgattggaatgtcaatgtgtccctgttgtgggaatctgttatttgctgcctagatgaacaatttaagttgaatcaggccattcttcaagacagagtcctcccgatggacaaggagagactcaagagctttctgtgtacatgagctaggatcattcaagctgtgacttggggaatctttaatttggatgactctccttagagcagccaaatcagcttcttgctgataacagtaatcaggttttatactaaagtccccagttaggcagagtaaacaggaagcagcctgttattgatctgtgttatggaaggttcttttccactgaggagactgaatattttatactgaaaccttttacttcctgtacccagcatatttttcctatatatgtgttaggacagaagtccttttgagtatctttattttatttgtttagtgaaactcctgaaactaagggtgtgggaacaaattatccatatttagtatatgtggtgggttaaaaaatgtcatccatttttgataacataggaggaagtgtaaattgttagtttatcagccatttctaatggtttttaaaaaatgtccttcatccacggcttcaccagaacacacacacacacacacacacacacacacacacacacaatgtccttcaatttcataccatttgaaaaataatcttgttgagtattaggattggctagagttttttttaaggtaaaaagtactgtgtgcattttcaacttctcttgatctttgcatttggaggataataatctccagggagatttgaagataataaatagaggtggaaatgcacggatgcttctgcaccaattctcagggaaggcttttccagatgtggaatgcacggatgcttctgcaccaattcccagggaaggcttttccagatgtggaatgccatggggagtctgtctggcttggataattgacagctgccagcttgtaatgatctgtgctaaatggagctggagccacagaaggcaacacaacagctgggctgctgggagccaaggccctgcacgaggcacagctctctccccaacacccatcctcagcagcctcaccccctaaagaaggtgcactgttccaggaaaggaagggagtctgttgcttctacctgatgggtaagaggaaacaccttgattcactcaaatgggccacggtcagataattagagattcgctttttattgcattgactttagcattttaatttaaaaaaatgtttatggatacataatagttgcatatattttgtggggaacatgtgatattttgatacaagcatataatgtgtaatgatcaaatcaaggtaattgggatattcatcacgttaaacatttctcattactttgtgttaggaatatttcaattccactcttctagttattttgaaataggcaataaattattgttagttatagtcactctattgtgctactgaacactagatcttatctaactgtatttttgtgcccgtgaacctctctttattcccctctccccactactctgccagcctctggcaaccatcattctactctctatctccatgagttcaacttttttttagctctcacatatgagtgagaacatgcagtatttgtctttttgtgtttggcttatttcacttaacataatatcttccagttccattcattttgttgagaatgaaaatattttattcttttttgtggctaaataatattccattgtgtacgtgtaccacattttctttatccatgcacctgttgatggacacttaggttgactccatatcttggctgttgtgaatagtcttccaatgaacttgttagtgcagatatctcttcaatatactgatttcctttcttttggataaatacccagcagtgggattcctggatcatatggtagttctattttcagttttttgaggaaacttcatgctgttttccatagtggctgtactaatttacattcccaccagcaatgtaagaggaactttagcattttaatcttaaattctttagcaaccagttcataagaggaggaaggatcataaatcaaaaggactgaggatgtcaggcaaacagagaaaacagtccccttccaggggctgggaacggtgtggctcccatcatagtctcagcttttccagttaatgaccgtgaaaccttcccctcaaatcattctaataggcttctgaccctccctcattttctggttcatcagatgaaataataccacctgtcctatctacctacctgcttctggggattggagaaattaatgtaagtgctttatccactgtgaaaccaatttaagtagaaggcacagatgaattaagaaacacttcctgctatgtatgatctttgtccttctcattctctgccttttctgacttgtggcctaaatcataaatgcttcctgataataataatagctgtcaattgttgaacactttctccatgccaggcattgagctaaatgcttcacaggtgttagtttattttatcttcatgataaccttgctcgctggtagtcttattgtttcagtccccacagttgaacctggactctgaatccagcatgctcttctagaaaagctcatgcacttccctttaggctgcattttaaatgaaggagctgcattcatgattttcaattttgacatttaaaaaatgatctaggtcgaacgcagtggctcacacctataatcccagtactttgggaagctgagatgggtggatcattttgaggccaggagttcaagaccagcctggcccacatggtgaaaccccatctctactaaaaaaaaaaaaaaaaaaaaaattagccaggcctggtggtgcgcacttgtaatcccagctacttaggaggttgaggcacgagaatcacttgaacttgggaggtggtggttgtattgagtcaagatcatgtcactgcactccagccttgggcaacagagcaagactctgtctcaaaaaataataataaaataaaaaatgatctaaaagtttattgagtcattttttaatgtttgagtatagcagaaggctagaaatcatagaatgcaattgtggttactgattaagaagagagagataaggcactggagagagagaaagagagagcaggggaaggcgggagaaaggaattcatgaccaagagaaaaagatggcttttttttctgataggaatagtgattttgtaatatgtatttgcatttataattctcatattttccatgcagataatccttaaaagcatataattaattaatgggcttttgatgttcctagtgccagagatgtggaactacattatcttgataatctttgtaaaagattagaagaggcttaaagtgagacagttcccaggattcaaaactctgccaaacagaaacgattaaccttgaggtgggggtggaagaagtgagaggaagtggactgaaaggggtggagttgtgtcaccaactccctcttttagtcagcgtcctggtctttaagcatcaagcctgatttaactttggctgtggtaggtccctgcctaactccaacagtccggagacaagttcaaggccctggtcattgtctgcatctagtgaaaaccctctggttgtttgctcctggttgtgttagataaacaggtaatgattaaacgtattttcactggcagcctttttaaaacaaaacttcatgtttctggagtgtcctctaaagatgaagcattttgcaattcaaaaacgttcccagtccctttccgtttctcagacgccctctgggctgggtgtctgtttggctgggtgcctcctaagagcccctctggtgaatccttcctgggaacctgagcccatccaggaaacacaggacaattttcagtttggtaggaaatcaggtgcttgctgttcaggttgaaaattgaggttaagaaataacacttataaggaagaaacagagtgacttcttgtgcagaatcgattctgtttcagacattggttatccagtgttgtgaattatttagggctttcattttactgctttctttggtggccttgccttttctcatcaaacattctcattgcctctgaaaagcaggccaagtaagagacgtgagttaaaactggagtctgatcattttgctgcttttgagcagctcctggagggcagcgggggagcattttttattcacctttgcacttctcctccccaccaacacttcatactgcatgtagctggggctcactggttctttatagatgaaatccacacagtagttctttataggtgaaatcactatttcactgtgattgcaggagagacatggagaaagggctccagctttgtttgcaaggagggcttccaaggtccgtggaacctgcagagaatgtggctcttcctgtggctttggtgttgccgtgactttcagacatggaggggatgcttgatttgtaacatgctgccgactggatgggccgttctcctgccccgtgacagacacggagtccgccacggtctctgtagcccaggctcaggatagcatctcacttcccaggtctaaactcacctccctcctgcagtcagcctacagaagtgcatctatcttcattgattgatggtccaggcggaaatgacagttctcattgcactggactatgcctcgttgagagctgaggggctaaggaaagccattctctctgccttgccagggagaataaactattgtgaacctcctggaccaaagccatgagcagaataaatacaattcagtcatatagatttggggcaaggcaggcaatgaggctactaaagaaagaacctgtgcccaagaccaagaaaatgggtgaatctgaagccctatgcttgtctatggggctggaggaggaaggaaggcttccactgggttaaaaagaaagttgccacattcttctatgtggttttcagatttttggggctcaggacatctttattctcttaagaataattgaggtgccaaaatattttgtatcagtcaatatatgccgtattagaaattaaaactcagaaatttaaaaaatgatttgtcaatttacttcaaaccatatgcttattatgtgccaacacgcatttttaaaaacaaattttattgtgtatatttgaggtttacaacatgatattataggatatatatagacagtaaaatggttacaatagtaaagcaaattaacatacctagcatctcacagaattacatttcttgtgtatggaaagagcagctaaaaatctaagtgtgactggcttaaaaaagaaaatttacttgttcaacaaaaatccctaatataatacaattttattaactgtagtcctcacggtgtacattagatttctaggcttgttcatcctacatatttgctgttttgtatcctttgacctacatctttccgttttctctcccccaccctttaccgcctactcatggtaatcattgtttcattctctatctctgtgtatttgagctttttaaattccacatataagtgagatcatgcaatatttttctttctttgtctggcttacttcactgtacataatgtcttcttggtccatccatgatgtggcaaatggaaggatctccttttctaaggctgaataatattccatcatgcatatatatatatatgtgtatatatatatatatatatatatatatatatatatatatatatatacacacaccacattttctttattggttcgttcatcagtgggcatttagtttgtatccatatcttggctattgtgaataatgccacagtgaacacgggagtgcagctatctttttgaagtgatgagcttgtctctcttgagtatatgcccagaagagggatcactgggtcctatgatcattccaactttaatttctgtaggactctctgtactgttatccatgactgtaccagtctacattccccccaacattatactaggttttccttttctccctattgttgccaacatttgttgcctcttgtctttttcataaattcttattattgaaaaatatttttcaaaatagtgtcattgttttactttactgcagctctgtttagtgtctgaattaatgggaggtggttggatttcatatctgcttctacattcagtctgttgccatgtcatgtcatgcactttctgaaaaactctactgtgtgtttgagagagaataagagtgaacaagttaaataatgtctcaatatctcagatcccctgtaaaaaggcctcaaggacttgcagggttccctagaccatgctttgagaactgcttccctaggtgcacactccccaaaacttgcctctctctgtgtttaatatgtggccatcttgtatgatgacatttctgcattagcagaaaatgggcatggtgtcccaagcaaataatccttttcatggcttttggcatttgaatagtgcttacgaacattcgggaaagcatccccgagacaagctagaataagattgatgttgaacgtcctattggacaggctggccaagttcttgctcatggactggcaacaggataatccagagcatgagacaggctcctttccctgcttttcagcatctgaatctcaaattgcatgtgctccacttcgtctgcacaacacatacgtttttcctcttcacaattaccaaaggctttgtaagagaggagcagttgctccaaggtctctctgagcttcctgtttccagtacccaagggcagcttaaatctgcttctttactcaccaataactgtgcagtttatccaactcatctgctatttcctgggtgcaaaatcatctcacttaattgtaacctcctttttcctgcattaatcaagacagtggctgagcggtggcattagcgaaataagcatgaatggaaagcagtgatttacaaggattgtgggctagtttcactcagcgccagtctatgcccgctggagagaatgacagtgggtacagccagtgagttctgcggccaaagtgcagatcaaagagaagctattaaaacaaacaaaacacaacacattttgatgttattctaacacaggaatatcatttttaatgtggctagaaaaatattcagctttgttctttgtcctttaggaaaactacctgcatcagtgctctgatctttccagggctggcggaaggatggtgtctgtagattcatttacaatcatggagtgttacagtgaggagagtcagagatcacccagcgcagaggaaagggtgtgggaggagggtgttgggcagggtggtgactatgccaccatagcaaggccctgggtctggtctctctttgtcccctgctaaacctaactgtagcgtgcaagccacacactagggaattagaaagccagcattctctctctgccccctgtgatcttgatggttacttaacctctctggatctcagtttcctcacctgtaaaatgggtatagcaataatcttagtctcatagggctgttttgagaatgaaaaggtagtatacgtataagtttcttaaaatagtgtataatatttaaaaagtacaaaatagatatcagacattattgtaatattattggtgtctctgaaacttggttttctcatctgcaaagtaggattttccaggttggcatgggaattaagttagagaatatatggtcaagtcttggagaaaatgtcaagtaccattaaaagtactgcactatattttgaggacaagtcaagagaacactttaactttgtacctgagtgttttcccacatgtaagactctatgattatctgcaccgttttgaaagcagggcagtaattttaaaataaatgaatatataataaccagggcaagaatagcaatataatcacaactagtaagaacaattgctaatatttgtggagtgtttatctcatgccagcactgagctaagtactcggtatgtaatatacggtctcacttctcaccacagccctttgaaggaggtactattattattccggttttgcagaggaggaaagtgaggtctctcagggcctctcagggtcactcaggttgcacatggctgggccaggactgagcccaggcagtctggttccggagttggtgtccttcaccagtgcagtagcagggctggtggtccagagggaggtggaaagggattacatcccagtttgagttcagcaggttgcaatgttgtgctctgcaggtgacagaattagattttttgtgcttttttggtaaggtaaaagatgtgatacctgttgggtactatggtcgctatttgggtgataggttcactagaagcccaaaccccgcattacccaatatgcctgtatgacaaacctgcacatgttcccccgaatctaaaacttaaaaaaaaaaacaaaacacgcatgatagtttttcattagtatttgggggaaggaagtggttgtttctttaatgagtaaatcattgacttgagatgggagagatcagatgcaagagctttccaagcagcacctgagtaggacagtgtaaggaggggctgggaaagaaatccacgtggagtttctgaagggaacctgagaatgtagaaaagaggtgtagaggctgtaacccaggagaagagccctgggagtgaggcagaactttccagggtgtggagggatgcagtttttctcaggttgactggaggctgtcccatggggcctggatattatttccctgtctctgtccaaggcagtttggtggagcaggatgattctgtggcaggcatcactggctctctctgccaaggctgtacagcttatggtattaagtgggggctcctgggagctttagggtcagagacacctgaattggaatctcagttccgccacttaaaaactgtgtggttgcacaagtactgaattctccaagtcttcataggatgattgtaaagattaaataagaaattgcatgtaaataaatcacttggcacttcgtaagctcccagtaaatagccgtcatcattagcattataattagatcctcccactagctgcttcctggattttccagttgtgttgaggcgctggccctaaaattgtggcttgacccccagctattttagatcattatatatgatgccagtttgaggtgcaggaccccacaggtagaggactggtatggtgctaagcctctcttccttacagatgcattgtttacattcaaggtggtattggccaggattttctgcttgatcttgttctaacacaagccttaaatgaatacgcaagaagggctggacaactgcaaacagccatgcccctggctcagctgatgaaggttgtggctcaccatttcttgatttagtgggttaccacatgttgccaggattcataagaacacttcactgatcatgcatttaaggggacactcgtctttacaccagacaggagagaggtcactcactttgaacaagacccggtcctgtgtctgtgaaatgcagggaccctccccgccaccccagatgcagatcattagctgagcaaggagcccccagaattttgcagcatgactttcactttgtaattgaatggtcaaggcatggatatcattggagcatctctaggggccagattgtctgcccaagggaacagtcctctgtgtatagccaaccagagtccaccgtgtgttacctgactacaagtttggcaggctgatgtcaagcccatactggcatgaaggcaggacaaaggtaggcaggcaggaggcatctgcaaagcaggaatcaggtacccacaaatgctccacagccccggtatgtgatccaagcagtagggttcagggttcagtatcaaagtctctaacaagcattcaccaggagctacagttgtattctggaatgtcagctagggcccagaacagggaaccctttcaagcatggggagaagtgggcagagtttagcagtggagtgtctttgagctgtcctgaaccatacaccagcctgcccacacctgttggctgtaaagtcattgcacacatactgtggcttttcccagcagcgtcttcaaggcagtttcttacaccacatgtgccaggcctgagagtttctgcagttttttcagctgctctaaaccatgatggcatcagcctctcagcccaactctccgccactacctcttttagctcccatttattgagtgtagttgttttccagtcacaatgccagagctccacacacattctccccttcagcccctcaatgaccttgtaagttaggtgttgttattatccccattttacaggcggagaaactgaggtgtagaggggttgagtgtgtgcagtcatatagcgagtatgtggtagagtgaagatgcagatcaggcctgtgtttccccagagcccaagtgctgaaccaccttgtctgtgacgtattcagcccaggcagaaacttactatgactttttcagctgccccttggagtcactgcatcaggctggagcagtggtttgcaaccttgactgcacattgaaatcaactgaggagctttaaaaagtacttatgcctgggtcttgccaccagagattctgatttcaattgatctgaggtgcagcctgggtatttaccagaccagggtttcgccaactttttctgtaaagggcagacaatacatattttaggctttgcagaccatatggtctctgtctcaactactcgactctgccttcgtagagcaaaagcagccatagaagatacataaatgaatgagcatggctgtgttccagcaaaactttatttacaaaaaaaaaaaaccaggtggctgcccaaaattggcccatgagccacagtttgccaatgactgatcaagtcaggcagctcattagtaggttctatcccattgccagtgagattagaattcatcttgcttctctagggctggtatctgtggcatcttgggagagccctgggcaccccataccctccaaaccacgaccttgctgcaggctccacagggttggcccagtttctgtgactgaacttctatgatggcctctattttgccgagggaccccagtgccctgctgagttggaaatccggccatgaaccgccacctgtttggcgggggtcttgtctagcttgctagccctcccccataaggagttaaaattggcccccttggtcttggctggcagccagctcctctgtaattagaaggattagctagactcgcgaggctgccacctgtttgataaagaagactgcccttcatgaacatgcctccccttgctgcctccccccaggcctgtctccctccagaggaagtccccagggaggtccagctgtccccccccaacccccaccttcactcagggtcctgcttccttctctctgcaatggaccttccatagccatgcttgtagcttgagcggcagcatcgttttcacccaagggattcagcacatcagttttcttttatggaatattaatgcagtattcccaaaactgtaagttgtgattatttacagagttgaaagggcaactggaaattatttacaatgtcaaaagggcaactgaatttctctggttattggaattatgctccaacccccgaaaaatatagaaatcagagtatgctttccttatcatccctcacgcggcagctgtccttcttaatagggataccacaaacatattggattgaaggaaaactattgctataggtggcactttagatattaacagttcatatgcacgaagtgccaagttagttgtttagacattggaatgcatttgttcaacaaacatttatggagacctgaatttgttccacatgttgggaataccttcactagagaaagaccttcatagaaacacttaactacaagacggtttcagaggtgctgtaatagaggtacatacagatggctcttgtgggtatgagaggctggagtgaaaggctgaggtgtcagggaactcagggaatggggctccccagtcggaaaacaggaggaaaggcatttttgggttagggaccagtgtgtctaaggcaggagcagggtgtgatgtgggcctggagtgtgtggttcatggggaggggagttgtgcaagttgaatctggaagatggatttggaaaccagtctagaggtcccaacttctgtgggtgatgcagaccaaaagaaagatcttaagtaaaagagaaatgcaatcaagtctgttttagcaaaatgattctagcagcagtgggggtctgaattagggtggtgggtaagaaaagaagcaggggtcctagtaagaggctgttgtcaaaatcaagaggcccctaggtgagaaagtggaagctagaatggatgacaactggaaggtgtgatcacacttaagagacagagttgatgggatgatgaaggccagtgaggaggtgttctttatgatttaaaatagggaaaaggaggccatgcgcggtggctcacgcctgtaatcccagcactttgggaggctgaggcgggtggatcacctgaggtcatgagtttgagaccagcctggccaacatggcgaaaccccgtctctactaaaaatacaaaaattagccgggcgtggtggtgggcgcctgtagtcccagctactcgggaggctgaggcaggagaattgcttgaacccaggaggcagaggttgcagtgagctgagatcacaccactgcactccagcctgggtgacagagcgaggctccgtctcataaataaataaataaataaataaataaataaaaatagggaagaggagcagtgttttagagggacaggaaagttaatggcttgagtttgggggcttgttggttttgggcatctgaggaacttacagttggagttacccattaggctgtgggtaatgtgagacaggaaacctaagagagaggattacaggtaaacaaacctactaagtacaagacactctacaaggcactgggtgtagaagtggttcctaggctttgttacttacagctgaacagagaaggcagatgttcagccataaacttggaacgtgagaacagcctggaaagcctgccaatggtgtgatcatgtgcaagtcgcctaccttcctcagctttgagttcttcattcaaaaaccaatgagtgataggaacacataactaaagtatctgtaggggccaggcatgggggctcatgcctataatcccagcactttgggaggctgaggcaggtggatcacctgaggtcaggagttcaagaccaggcctggccaacatggaaaccccatctctactaaaaatacaaaaattagccgggcatggtggcgcatgcctgtaatctcagctactcaggaggcttacaacttataaacactattatatacattgtatgataaaatacactgacccacctcatatgcttttgaaaattaagcatatgaataagcaatagatttagatgttatgaaactcaaaattcataaaatggtaaatagtgaaaagtctcccttgtgctctgtcctcaatccaccagttcctttctcagagataccattttcttgtgtacccttaaaagggtattttttgcatgtacaagctagcactgtgtgtgcacatattcttcttttttcctcttttttttgttgcagaaatgataacctactattcactattctgtgccttgctttgtttgcatactgaaaattatccatggaaggatacagcaccatttttacttaaggaaccccttatttagggacacttaggttgttttcaatattctgctcttgtaaagagtgctgcctcatttcacacacatgtgagtgtatctataggataaatccctaggattggaattgctgcatcaaggagaatgtgtatttgtaattttgatgcttgttgccaaatttctgtccatagtggctccaagttcccctcctattggcaaggtctcccgtggctatgaggatcacatgaaataatatgtttaaaacaacttcatgagctggaaaatgggtcaacatatccaaaggatccttatccccctctctcccctacacagtagctcttctacctgctgctgggagaagtgatggttacatgtcaggggagacaccgtacagccccgtcaagccattttcccctaagagatatttatcaggggttgttttgacacgggagatgcctccttgtcctcatctccctgaagtacagatggccgtggggctcctgtaacacatctcatgttgtgcctgagtatgcggtgcgtcagaggatgtcagctaacagcttctgctgcctcggcactgggtggtgggaacactcaggactccctcccgcctcctccataaataacatagagacagttgtgttgactcggcagtggcgtgatagaacaggccgggatgggaactatgacctcatctggttttcgacaagcagtgaagatgtagctgataatgcatgtcagctcatttgtccatacaagctgtgttcattgctactggttcttctgtttgtgttgtaaattctgtttcacattggagtttggtattaggtgaaagaaagaatgacagggattcatggttgtctcttattgagatagctcctcagttcagttcaacagattgtgattgacacatctcaatttaactccagaagtttccactgagtgcccactatgtgcagggtacagtgctgaaatgtgtcatgtttttaaatactgcttacagctacagctgttggctgtctacatggactttcgcagactgaaatagctttcctttttccttttgctagtggctcattatatgttacattgacaaactaaattgcaaaccagggatgattcactttgcactatagaagcgttcctgaaaattgtttttgaaaaataattgttataaaataaataatgttttaactgtactggtggatttttctattaaaagcaaattccaatgctgaattattttgaaagataaaacattattttctgatgtatctgttcagtaaaggagaattttttacctaaagggaaaataaatttgatacctttaatcatctgaagcaataccaaatataggctttaaaaaatattttaagagcctgtgagcagtttatactaacaaaaagaacaaatgccatgaagatcacgcgacagagaaagacataatcttatttgctggcaatagctaataacgataaatcttccagtgtaaaaaataggaatcgtgaaagaagcaacagagaaagatgaaaaagattggagaagaagaagaaaatgaaaacagagaaaaggaacaatatcagcaggtggtggatggcccgagtggtagaggaagtgaaagccaaatagcaaaagtggcagcaaagaggacagctggccagtaggagagaaaagagaagccacctctcctggaagctgtgttatctgaccccctcgtgctgcttctgcctgagagtgcgtcgatgtctgacctccactggagtcagtcagtcctgggaataccgtgtattcctgcataacagtaccttagagctttccttacgtgcttacctggtggcaggtgactgttctgagtgctttgtgtattaacttgtttagctgccttagcaaccccttgagaaatcattttccccactagacagaggacgtagctgagcagctcacccaaggccagaagcactgagcggaaaagctaggtttgattcgcagaattctaagatggtctgcccccaagtttcccctcggttggtatacacgatctgtagaatcctctccccttccatgtggacaggactagtaaaaatgatgggatttcactctctttattaggttacattatacagcaaggataaagagatatttgcagataataagtaaggtccctaatcagttgattttgggttaatcaaaagggagacgtccgggatgggcctgacctaaatatgcaagctctttatatttatatttttatttttattgtcatttttattgagatggagtcttgctctgttgcccaggctggactgcagtggcacaatcttggctcaccacaacctccacctcccgagttcaagcaattctccagcctcagcctcccgagtagctgagactaaaggcatgcaccaccatgcctgcctaatttttgtatttttagtagagatggggtttccctatgttagccaagctggtcttgaactcctgacctcgtgatccgcctgcctctgcctcccaaaatgttgggattacaggcaggagccaccgttcccagccaagctcttttttttttttttttttttttttttttttgagacacagtctcactctggagtggctcactgcaacctctgcctcccaggttcaagcgattctcctgtctcagcctccctccctgtctgtagctgggactacagacatgcgtcaccacgcctagctaatttttgtatttttacttattttatttttattttttgagacggagtctggctctgtcccaggctgaagtgcagtggtgcgatctcccctcactacaacctccaccttctgggttcaagcgattctcctgcctcagcctcccaagtagctgggattacaggtgtgcaccaccatgcttggataatttttgttttttagtagagatggggtttcaccacgttggccaggctggtctcaaactcctaacctcaggtgatctgcctgcctcgacctcccaaagtgctgggattacaggcatgagccaccacatttggcctaggcaagctctttaaaagaggctccaggttttccctaaagaaagataattgaagctccagattcttctgctgaccctgaagaaccaaacagcctgttgtgaacagcctatgggaaggggccacgtggccagaacctgagaataggcttaaggttgctcagagtggtccctggccaacaactagcaaggaaatggggacctcagtcatcagtctcagcgaagtgaattctgctaacaaccacatgagttgagaggagaatcctgagctcaagaaaggaacacggtctagctgactccatgatttcaacctgggaaacctggagcagaggacccagccaagccacacctggacttctgacccacagcaactgtgagctagtgagtgggtgtcgttttaagctgctaagtttgtgttaatttgttctgtagcaataacagatgaatgcacaaggatctgaacctcgtgattctggctgcagagctcacatgcatcctcccttctccaggcagcctcttcagagacgtcatctcaaaaatcactaaatcctggaacttcagggttgaatggggaactttgatctagcccagttgtttaatcaaacttttcctttgcagcagatggccactgtgcaagcagactgggggagctgctctacttgctgtggggtgtgtgagccgcttctgttctttgcactcctctccttgaggaatctctggggaacacagtttgagaaccactgatctgatccaacaactcatctttacatttccctctacaacatcctgacaccttgttcctttggaaagtcttctgtggcattgaaatctggctcaccgtaattcccactattggtccaggtccagtcataggtgatacacagagcaaatggaactctttttccataggagaatgcatcactcattaaagacagttctcacgtttcatggaagccttctattttccagacaaaacatctccatgaccacaaaggagctgccagtcccttctctcctagtgtttgcctgtgtttctcttagagtcaggtcaggaactaagcacaaaatttttggtgtggtctgcttcacataaaatacggcaagcctagcataagccacagtctaaatattctgtttccatgaatgcagcgttagaccacatttgctttttcgcaaccacaatgcagtgctgactcataccacacgcagagtcaatcaaaattcccttttcacatatgtggttgctagggtatgtcttcaccaacatgtacttaggtgtgtttattttaacctgaatacaggcttcacattcatcaccattgtgtctcatcagggatctggtgcatatcttggatgatcctgattatgtcatccaacaatattgctcttctccctagcatcacctcaactctcaattggacaaatatgccataaatatcctcatcggagttattgacagaattttggaaccagacagggctgaggtcagagccctctagcaccatattgatgactattcccagtgtttgggtccttcaaaaacttacaaatccaactaattgtatcatctaatggcagtgatccaactcataaaggtaccaccagaaacataatgaactatttcctggccgccaagtacaggcattaagtccatttctctgccttcccaagccaggaggtcactagagctcctcctgcatgcccacaaacatgtaggagcctcttttcgaggatgtgcctcatacccacccttttatagtttgctcctccttagataaacaccattcccccccgccccccatgattccattctctctcatcttttttttttttccccttactcagattcccttgggaaaaggtaaagactacttagaggataccagtgaaccttggagtacctaaatgactgtggcaggcctcatctttatttcagaggaggaatctttttggggtatcttatcataagaaatagggtagggctccagtgtaaaagtcaggacaagttgcataggtgggaggggtgcagggaaaggtggggtctgcatgtggggatggggtggggagggagatgaagggacaaggctgtgtttacctctgaggtttccgtggggcaggggcgaagccagcgtcttctgcagccttaccctttcttcctctcatttcaccatttctctaccagccacaccttatattaaaacagagggtaaggggaaaaataagacttgctttgtaaagtggggtcattgttcttgacagcactgctccatgtggcatcttgggatggatgagttcccagatccaccctaaagtggagatgctgtgattccacaattcctttagagagaccataaagcccatatgagtgggcttggtggagatagtctgcgattataaatatatcacaagcctgtcttggtttattttttcatatacctttctcctttattcacattcatttatataaacgtgaaagttgccatgggtcttataggatacctatgctacctgaagaccaagagcttctgtttgatcattgaaaaagaagtgttttagttgtggttaaatttgacagtgcagcattcacctagtattcatttaccatctctaataactatctcccttcccctggggatggggacccttttcttctcctgtatttttagtccatttgtttctggtggagtcccctctatgctctactttatacgggtatgcagcttaggtctggccaatcagaaccttatattctcccttgtttgattcaaggcaccaagagggcagagagacttttgctgagtctcctggcaaaaatacgcttggtcttcttcactgaacttttcaggttttgaggctcaagccatctgagccaccttgcccccaggaagtggggatctgaaagaggatggcactaacacagagaaagtggagatgggagatggaggcaaactgaactctgggggcatgagggggaagtgactacattctagactcagccagatttcttgggtttgaattgttctgccacttacaaatgtggtcactctatccagattggtctctgtgcctcagtttactcatttgtgaagtgggaattgttatgatacctactcatggagtcttagtgagggtcaggtgagtcatgtgaaatgctgagaacagcacccagcatttggtatgtactatacaagtgttagtcatcatttgagccctatgccaagacatgactaaaatgagacccaccccttgatttttttcagctcaaagaacaataaattttcttttgctgatagtccgtttgggttgtgtttgttgtcacttaacccaaagagtcctaactagtagactcagtgaaatcaaattcatattcaggtttaaattttgtcttccttaatgaccctaagatagaaataatccaaacttagatattcctttcttgattattgtccagcaatgagcaaggtcttggaactggctaatttccttcttcttcctatcttcttgcttgcatttgtttgcaatttggtcttcagcatgtctttaaaaaatactgcatgtcacaattatttaaggaacctcagaacactgcaattagattttcataacaagcatatactttatgtcctttatttccaattcatgcagtatttaaaatgacaatatgaaaaaataaactatgaaaaattaaaataaatatattagtatattagacataaataaaaatttaaaaacacactgaatggggaaggtgggtagttggctggagctgtgtgtgggaatagggagcaaataagaaaacctgggaatctccattgggttcagcaactgcttggctgtgtggccttggacaagtcaattctcgctggtttcccagtctgtaaaacaggcaggatgtgatagctgaggttccttccttattaattttgaagtgtgtaagagctttcttaagcatcttaaataacatgtttaattttctctgtggttgtgaaatgatgcaaaagaaattagaaaaatgtagctgttaatgagactcatctgcgttttgtgattccttagaatttgtggtgtatattttagggttactcccatctcttttctttctatatccaaagggatttgtttactctttttttccccccattttcttctgtctcaaaaatccatgtggtcttcctgagtcctcactgtcttaataatcaaggggcttggccatttcagctgagaatagcagcagtggctctagtcagctttaattagcagggagcacacagagaggaacaataaggaaccagaattgaaaacaaatagtaaactagagacaatggagacaaagaaatggagacaaagcaaataagtagaaccagttcagagggctgggaagacagaagccacaacagtgttagtcttcctttttcttagaatggaaagccaggccaggcatgtagtgggcactcaggggatttgcaggagtgagaggggcaagggagaaatagatgagattgagcatttggctgtgtgtggacacgcttcatcgtgccaactcaactagccctgggatgccggaggaagaaaatcacaaaaggaaacttaggatgcccaggttccagcacaaaatgcacttcccactgccgaggtgaaactatctgaggcattgaatgaggaacaatacaatttttgagaaagctaaggaggtgcctaccaacccgcaccaacgcatttgtttttgagaaacgtggtgcttatttgcaagtaagtattcatttcatgcctcgctatttggcttgtaggttggacttaattaaaaaagctgtagcatctttgagtccaatttcctcttttcacatagcatctgtccctgacagcttgtgtgaggctcggccacttgttgaggctgaggctagaggaggaaatgacaagggagaggcaagatggacatacgcctcttgttggaggtggcactctctaattctgcatggccccgtcacgtgcttgggaggcttcttggtttaagcaaggcaacagatgtctccgagagggggatgctggcagcatcccaaaggccagcaggactacgggttaggcatgagtaagccgacgggagagggaggcacacatgctttgccctctgctcagaactggaaaacaggcgaacattggataagagcaaattctagaactgaacagagggtgatggcggaaagaaaatacttctttggaacaagcattatcctgcggggtggaggtagatgtgggggatggggaacttgactattttcaaagacaaatatgccccagcacttcctacattgaaatagatggcacaaaagataaaagtcaatagggtgttgactttgcctatcaacgccgcactgttttgctttgcaaagcatggctacttacatatgcatttacccggaggtttgactttaaatgttaccaaaaaagagaactgaagctttctccccttacagctgtcattcttagttatcaggacaagcctatcagtaaatccaaaccaacctgtatctcattttgaaacaagtaattgagtttgtggtaagtaagctcttacagatggagcatgcacttaatctactttgcatttgaaggttttagtgttgcttttaaagcagtttgtttgaagttcaaggtattagaatttggatctttagggacttcactcttaatttaaaggaatctttgtaaattgcttgggccttgttcctgaaattacctggcatttccctaactgcactgttttaaagcacaaggaccgtttgaccaaacatgctgcattcacgttctttttctgggcctttgctcttggcctctgcatacctttattccctaacaacagatgttctggctatattttgtctctgaacagtcccttttgcttttatgcaaaggaacccagcactgtggcacatcccacctgaagcttgtgtttatcgctctgttccttgtggttctgtggatagcgaatctctgctgctgttcccatttctttccatttgatatctgaagaatatagtcagcctgattgctgagcagactgtcagagattcatggaagaagaccatctctgggccatcttacggcttagattcacacacagccacatatctagaaagccagcaaggtcaggagcaataggggttttgtttggccaggcagtattcccgtgagacttgtgtgccaccatgaataacgtttagtaagttttactggtactttgcgaattacacaagtaataagatgatatttatggacaaattagaacaaagtatagataagcaaaatggatgacctgcctgcaaattctacatttagaagtgttaatggtggcaaatccattcgggtctgcagcaacttcagttcttgcctcctcagaagaaaaaattcaaccaaggggcataaggcacagtgagagaccaatgcaagttttagagcgagagtgaaaatttattaaaaaaatttagaacaggaacaaaaggaagtaaaggacactcagaggagagccaagcaggcaacttgagagattcaagcgtgtggttagacctttgacttggggtttatatgttggcatgctttccgagggttgcatctcttcttcccttattcttccctgggggtgggttgtttgcatgcacagtgtcccgccagcacttgggaggggccacaggtgcagtgtgtttactggagttgtacccatgctcacttgaggtgcttttcccttaccagcggagtgtttctagaggaaggtcatataccagttaaatgccaccattttgcctcttagtgcgcatgcttgggcccactcacccaacttctaagatcttactgagaagcagctgatcaccagtttcaggtgttttctatctattgggagccagccgttccctggcaccagctgcaaccaattattatttaagagacagattaacaactgcctgaccatcacctgatggtctcctgacattcccggttggtggtggaggggtgctctcctgccctgcttgtgtctgcctgactccctactgtaacaaaggtaatgcttctaattgccttttatgtacatatatacatgtaaatatgtattttctttttaaatgtggtcagactgttcccattaaatttcaaaatctaccatggacatatttcatatctttaagtatttgacattattttaatggctatgcatagttcagttgcatggatggaactttcttttttttaaccagtcaactattgttacgtatttaggttgataccagtttttctttctaataaaccatgctgcaatgaacattcttgtggctaaagctttgcacatccttaatgttttttttaagtattaaatcctagaagttgaattgtttgatcaaaaactgccacgattcttacatgaatctatcctgtataccctttaggatggcacagagtatctgtgtagcaaaagttagcaccgaatgttttccacactaaacctgagatagggaaagagcaggaaggacttttgccctttactctcggaagttttgtttgtattactgcctgctataaatacaaagagaaggacttggctcctcctatattttggctgttgcaagccctaaatatttaattcaatatgtttaaagtaggccttatgaactaccggggcggaggattttatgacacttttaccatgatgtgcaaatttgtatatccacactttatctgtaggagtatctacatacatttagttatgggaggcagaggatggagcgagagacgggccagcacccttaattcttctctgtgttgaacagagatgcatgtttttgatatgctgaggagcattactataaaatgcagactaatagtatttcactggagaatagaaaatacttagggaagctggagtgctccgagacaacctttcaatccatttaccaaaagagcttataatggaactcaggtttcaagggaggtcaaacactaataaatattgagaaaaaatagttaaaaggacatcaagttaatattttacaatctattctttgatcttggaaggcttgaaatatttttctacactacttctgtgatttattgattcacccctgccaattggcatattggaacagacacagatgccttgcttttaactacagcttccgcttctataatgctttgcaatgccaacagatttttatgtattcactggcatcacttattgatactgccacagttctggaatatttgctagttaaaaactggatcgttgtcagtaaaagcgactgaaatgttattgatttttgtttcaatgctgtaataacatctcttggttttgttgtattggtttggggggaaaagtaaaacaccctgcatttcattgactcttccacctttatctgtattcaaaatatgttcagaatctgattatttttctacttttgttgtcaccaccctagtcttggggaagaaaatatatctgtcacggattacaataacctcttaactggctgtttccactcttgcctctcttcagtctattctgaacccagaagcccgagagagcttccaaaatgtaagtcagatgatgtcactcctccgtctttgcactcagagccagcctctgcatgctgagcctcatcttcctcacctgccacatgccccactccccgcttccattgcaaagacagagctgtcaggagagagtctggattggcagcactcgtttgcagctaccaatctcaaggcccagatgctctgccttccctgctgtttctgaaggtgattgtccctgctgctgcctaagggccccattcactggtccattaaatccttttccctcccaccttgtccccttggccctgctgacaatggccccttctccctcctgcatcctcgattttcccctgaattaaggactgtcgggctttgacccatcactctacctacacccttcttctgagggcagctaatgcccccccccccccccatattaactccaaggtccactctcagtccttgccttatttggcttttcagccacgcttgcgaatgttgatcacttcctccaccttgaaggtgctcctctggcttccacaaactgcactatcatccctcagacttctggtcactgttacttctctgtctttacatcacgctcctctctccttccctcactcagctccagacacacaggcctccttgcagttcccgcaaacaggtaggctgtgtttcagggcctccgaacttgctgtgcctcctgcttcgaatgtgctcttcctagctgtccgcatggctctccgtccctctgtccattcaagcacgtacttgaaaggcacaggtgctacctgcgctcctttcccacactgtttccccctagcacatctcattgtctcgctcactatgtgttttatgtatgtatttcatttattgtcagtctctgtgcatataagctccacgaggctgggaatttttttttttttttttttttttttttgagacggagtctcgctgtgtcgcccaggctggactgcagcggcgcgatctcggctcactgcaagctccgcctcccgggttcacgccattctcctgcctcagcctcccgagtagctgggactacaggcgcccgccaccacgcccagctaattttttgtgtttttagtagagacggggtttcaccgtgttagcgaggatggtctcgatctcctgacctcgtgatctgcccgcctcggcctcccaaagtgctgggattacaggtgtgagccacggcgcccggcctgagggtgggaatttttatctgttgtgttctctgttgtatctccggcacctggaacagtgcctagtatgtgatgggtgcataataaatattagttgaatgaatgaatgaatattcacgagactgctagtagggtacttggagaaatacttttgggagtctttgtacagggatttaaaagatttataattttcttacagttacatgatttgggaaaaacaggggtgtttggggacaaaaacaacaaatatttggaaggtggcatgcctttcttattttgccagcctttctgtatccacagaaacactttctcaaaactgtaaattgggcatatgtccttcgtgcctgccttgtaaccgcaagaagataccatttttgtgccgcgttgaaagacaaggacagaaacagagagaagcagctgagatcttaagtcagcacgtttgattcagaggcattataagtgtagacctgagagactctgctcaaaatgcagcaaatccctgctttctgtctttgaggcctactgtacaggtagaaatgtcacaggtcaccactttattttccccacacgtgtcagcacattgagtgcacacagcaccatcccctccctgcctgttctcacgtatgtttttgtcttcaaaaattccttctctatttatgcttgctgaaattccattcccttcaaggcccagcaaaaatgcagacttgtgtgtgaagccttcccagacccttgcagtcctcatggatcccgctgtgtgctatgctctttagaacaagcaagccacagggcagtcatcctctgtatctttgcaggattggttccctggaccccccacagataccaagatccatggatgctcaagtctcttatataaaatagcatagtatttgcatattacctacacacattttcccataaactgtaaatcatctctagactacttataatatcaaatacaatgtaaatgctatgtaaatagttgttactctgtattgtttagggaataatgacaaagaaaaagtctgtacatgttcagtacagatggaaccatccatttttttcaaatatttttgatttgtggttggttgaatccacagatgtggaacccagggatacgaagggccgactatatccctcagtttagctgtgaacacacacacacacacacacacacacacacacagattataaacccattgagggcaagattatatcatacttttttggtattttcagcacctagaaaatgccttggacactaaaggcactcagaattgtaatgaaatggaaacaacccctttaaaaaaaaaaatcagggccaggcatggtggctcacgcctgtgatctcagcactttgggaggccaaggcaagtggatcacttaagcccaggagttcaagcccacccatctatttaaaaaaaaaaaaaattaaaaaagatgagagagttaaaactgtgaggaaatcgctttatggttattgaggtgttttctaccaatgttttcatctggtagcatggtcaaatcccagtgagacttgtctgttgagcctacttacttcttttcataatatttgttagtaagagcaggcaagtgcttttgggggctctaagtgagcccctgataagcaagtttttgactaatgcagatctggcctctgtggcattactgcctttgccagcagaggggattaggcaaattggcaaagggtcttgagccagcagggtcttgtgggaggtttcactgatgcctgagatgttgggcattgggtcccagaggaaggagagttggtgcaatcttggcagctgagctgtctgtgggcaccacaggcttgtccatgttgaataaatatgtgttgtagctgcgaagccctaggccaggattactctaaaaagagaaaggtctgtccgtgtgtaatcaccatttttttttttttttttaagacagagtctcgctctgtcgcccaggctggagtgcagtggcgtgatctctgctcactgcaacctccacctcccaggttcaagaaattctcctgcctcagcctcccaagtagctgggattacaggcgcccaccaccacgcccagctaattttgtgtatttttagtagagatggggtttcgccatgttgaccaggctggtctcgaactcctaacctcaggtgatccacctgccttggcctcccaaagtgctgggattacaggtgtgagccaccatgcccagccgtaatcaccttttaaaaattctagctatatctaatgtgttttattgaagcatatgctaaaatgctgtatttgtaaggattctcaatgatactgggtaaatgacttgtagtttctgagtgctgtggagtaaaacaatagagagatgtcagatactccagagaagaggaagggtaccttcaagagagcatttccctaacagactcagttagcttcatttgcctaacaaacagactcagttagctttggccttgaaggtatttgcatgttatagggcagggtttcctttcattgaatactttttaaaagtgcttctttctcatagcttatgtgtactccattgaaaaaatgagggacagaagagataaagtgctctaaatctatttagcagtcctcaagggcataactacagccagatgtttaatgaacttactatgaattgtcttgcagaggtacagagtgacttcttaggggtaaacactttgcctgtaacctgaattcatgcacaaacttacctctatgacaggatcctggctggaggggagatttgcatttgggagctgggcaggtccaggaggatgctctgttaatggctcctctggattaagaaggggatctgtcctaacgttgtaggacattcttcttagttcaggtaaagacagggttcttgttacaagaccatgaaatattaggctcaaagacactttgaagagtgagaaaaatggaatttattgggtgaaaaggaaaaaaaggggaaacagggaccctcagcggagcaagactcctgctagtcggtttcccaccttacagattgaatcccaggttccaccctggaacaggaggggccaggctcctcgcccctgcaaagggcactaaattctgtggcctcaccccccattctcctagtgttctggggacccctttacacctggctgtctcattctccgctctgaagaagtccatctgactgcagttagaaaggataaggatgaagacccatcttagcctcctgctgacagggggcgctgttttggggaaacggcagtcagagctccctcaaagaccgatctgaggatccccggaagaaggggccatcagctgaggctctggttgcgtgatcatttggagtttgatggcctgaagttgagaagagacaaaccaggttattagaaaacatgtattaaaacgaaacaaggtggggggagggtaaggacagctcaaaaatcccgaggccttttagtagtttgcacagagagagggcggccaaaagcccggctggtacaaaaacgttacccttttgccagcatgttgggcttctgggttccctccccaccgagcccagtcctaagccaactagtttaaggcttgggaaattaacctttcccagtttggaggatgcacccgaggggaatgacccattaaacagagacacgattacctatctgtgaaaagaggacaggggaggagagaggaaaaaagaaggcgttttttaaaggagtcccaggggttcaggatgcatttgaaaggggtacagactgaagatgaatggctacccgtctagaaagaggagagcaggagtccctagttcccttctttgctatcaaatacctggggttcgtgagggagagaaggaagagcatcttccttgcatccccgaggccttggtgacttcggcaggcaccacccacgggtgccaaagcggctttcacctatgaagcagggcggcctaaagcataagaattatttgctctcacttatgtttctatccccactactgttagtagccttggagttccccagacctcatttatgccatagatagtagcaccacccttatttatgaaacaagaggcttggcttcatcagcaggaattagccatgctcacttgtgctctgttaacctaggttactgtttgcctttggatttcttagctccagtttcccccgtcccccctcccccgcgaccagggctttgacccgaagcttggaattaagtttgggacaaaaatgtgtttcgggggggttgcatggactccttataagccgaatgctaaggtgaagctgtggaacttagtccttctccaacaagggatagaaaaggatgtcttgtgacatgcccaggtaactggtggctacagtaatgcttgctgagatttgggtgcacggtgcttggctttggttagctcccttgctttcattttcccaaaaaggaaacctccgagtaatgggcatcctatttatccccatcacctggcaggattagcaggagaattgcttagaactagaatatcgatccaggtttttaaatgcctcatcccttttgttccttctgagctgcagctggagattgctggttggtttacaagaacaagcaggttagtttaaaaatgtaggcaaaaacttaaaaactactaatgagtttagaatttaatgacaaatgtatgataagttttgaaacataatttctctctttctccagtcctcatttttgttaaaaaaaaaattatgataggactaagttgtttgcaaaatagactttagttttatactgggcctgattatttgcataaagtgcagcaaggataactatttttaccaaggcctcttattttttctcagatactttgaagggtgagcaaaattgaatttattgggaaaaaaggggaagcagggattctccgcagagcgagagtcctgctagctggcttcctgcctcacagattgaatcccaggttccaccctggaacagaagaggccaggctccccaccactgcaaaaggaccaaacatcctatggttccaccccgtgctcccactgcgtagaccggtcggagtttctccggggacccctttctacttggctgtcttactaaggaacataaccagtactgatccgtggtgatttctgttgtcataagataatgtactgtctggtttcattgaaatcttgtttatcatgtgtgttcatcatggggcacctaaatcaacacattcctgaccccataggcagtgctgtctgggagaccttaacaaaggatttgcagtcaggttgagtttcattttggggagtgttttctgttctagtactttcagaaatttttgctcactgtatccagcaacaccgcctctgctgcttgctagctctttgcttcattgtgctcatacatcaaataaggatggggatgtcacctttgtcaggggtcttgagataatagataatagttctggaaagcacaacatggatgtaatgtattattattattaatgcacatgactcaaaactctaacttataagagtaatgcaattatgaaatgaggttactaatattgcttgttgtcccataattcctgtatttccattgagcttctattaagtagaaggcatggaatactgagctagaaacacaaataactgatgatgtagaaagcattttaagaaacaagtagacaactgtccatgagagtgcagataaaagcataagttcccgagaaggagaatcagggaagacctggaggatgaagcaacttggggatgggccatgggcatggggaaatgggattccaaacagagaaaataacatagagtaaaaaactggaggcaggaacccagaggggcccagagtactgagtgcaaattagactgggaagaaagatgggagcacggactggagccgtgggatgtttttccctttgcagtggggaggagcctggcctcttctgttccggggtggaacctgggattcaatctgtgaggcaggaagccagctagcaggagctgccagattatggaacgtcttacatgtcaagctaaggaatgtggaatttctagcagaagcaatggtaagcagagtgtaggatgagggaaccagatgcaatagaccaaatgaggtgttgaagccttcagggcatttcagaaaaaataggaggtgagggtgaggcaagaaagaccctgaaagaagagacaggacttggccattagtgacatatgagaaacaaaagtgagctagggagaggagggtggggcaagggtcaggtagttcattagggcaggaatgccttcctgggcctttgacactggcttctgaatggacaatcttgggaaaacattgcccttttatatttcttcccaattttgagtgatgctattttctacttctaattgtgctcaaaatagccagagatgcagcgtaatacttggagtcaacaaaatgatatggtgggtcaaatttgtaaagctaaaaaaaagtagtgattcagtgttcagacttgaaaagtttccttgtttcaaaaaacaccaaaacatgaaattctgaattaatgaagcagataaattagcaggtgattatttgaataacaaaagaaatattttccaaaagccccttttttcaggaattctttaagcagcaagtatgcctagtcttcacccccatttaaaatgtgatttatttgtaggcatttgatgaaacacaggaaaggaatgagcttatctcgtaaaacatgatattccttagagctacatgttaccatgtgcaatattttttaaatgtgtttattcttatatgtatgaaataaccataagatgaaaattctcagaaattgaatgagtatctttccattttcttttagttaattttgagaattaaagctgtaatgttttattaaacatataaatgacaagtttaaaatttgtcaattgttttgaatactgtcatttgtatagtcccctaataaacacagagtccagaaagtcctttgtcattttttcttaaaaagcttgtgataagaaaagcttttataatgtcagctcaggaaaccctaacaatagcttccctcatgcatccttaaatgaggtaaatttaattattttatgtttttctagcagttcctactttcttctatagaatgcttttaaaaattactctttgccacccaaagtatttgaaagcagggcctcaaacaggtacacacacacacacacacacacacacacacacacacacacacacacagttttttggattcatctggaatctaagtgcagcaccaggtagactgctttgccctaaaagaggatcccagatgctcctggcctttctgttgtgtcctgaacgctggatgatccaagcccactcaggatgcctcttatccttttctgaagggagaacctgctacattgtagagagttggagatctggactccaggcacttgggctgaagtctttgttcatgctcttgcttggctgggcgaccttagcaagtttcttaacatctctctgcctcatctcatctcatctatggcatatgaattatactactcaccctacgtaatcttaaaaaattgcactaaaatgagagcactctttgagttttaacacattgtacagaaggaagtgcttgttatcatggtggtagatttcctccccctttctcttcaaataggtccatgtttgagttttttggtctaggaaaaaaatttacagaaatcccgacttaaacatatatttccactatcttcatcgaagccatctgcagccctagctagactgaagctggccactttggggataggaggcaaaacaccatcctgtctacctgtggcactgaaatttgtgagatgcacttccccttgaggaacatgggcaaagccagaggagccctaaggcaggacctaatgtcacaggctggagaattccaaggataaggaccctcagccttttgcattgacccgtggctgtctctctctaacagagtgatctctagagctacagtttagcgagcgtgattttaaaaattgtggtcaaatatacataacataaatgttatcattttagctgccgccaccgctgctgctgcagctacttctgcttcttctgctgctgcttctccctcttcttcctcctcttcttcttcctcctcttcttccttcttctccttccttccttctttcttcgtatttcttctttcttcttccagagtctcactgtgttgcccagcctggagtgcagtgatttcagtttactgcagctgcaaactcctgagctcaagcgatcctcccacatcagcctcctgagtagctaggagtacaggcatgtgccatcacacccagctaaattttaattcttttttttttttttttttttttaagagatagggtctcactatattacccaggctggtctcaaactcttgggctcaagcgatcctctgaaagtgctgggattacagatgtaagccactgtgtctagccccattttaaccatttttaagtgtacagtttgatgtccattcacagtgttatgtggccatcaccaccatccagctccagagccttttcatcttcccaaactgaaactctgtaccgattaaacaataactctctattctcctcccctctccagaacctggcagccaccattctactttctgtatttgaactgactactccacatacctcatataagtagaatcatatgcttttcttgcttggcttatttcatttggcatatgtcttcagagtttagcatgttgtagcacaagtcagaatttcattcctctttcaagctaagtactgttccattatacacacgtatacacatgtgattaaatagtattcagcttagagtgacagatcccggtcccgcccatcttccaggtccatctaggttccaggggtctgactcagtacctcacatcaggggcaacaggctgtctatgccttgccattgtgcgttgatgctggcgtctgtttccctgtccccagtcattcatccccctagtcattgccgtgctggcccacgttccccacagcaagacagcttaaagtctggctctctctaagttattttcatgatacgcttgatgcatatggatcatccttctttccagaaggaaacttggcaggctgcataagccttattcccattgatgcgccgcctttggggcctgcgggaatcattcacctgttcttgtgatgtgctggggcactaggacccacctgggttgtctcagtcattggcgcaggcacaccaagcagacgtatccaccctgacacctccctgtcctccccgcctctaccagcacaggcaagtgccatgcccccttccctcttatttcccagttccacctgggaggttattattcactcctctcaggatctgcctggaggtgggtggagtttagggcccttccgtagggactccccggtgtctaatacccttccaccacctccatccattcactagcttcccccagcctataggactttcttcagagccttggatcacttaacacctatccttccaaatcatgccagggctcaagacttcgaagcagaagataatccatttcttagttttctgctttgtgtttctttccttctttctgaagtcatgaaagcaggccgggcatggtggctcacgcttgtaatcccagcactttggaaggctgaggctggcagatcacctgaggtcaggagtttgaggccagcctggccaacgtggtgaaaccccatctctactaaaaatgcaaacattagccaggtgtggtggcatgcgcctgtaatctcagctactcgagaggctgaggcacgagaatggcttgaacccaggaggcggagattgcagtgagccgagatcgtgccactgcactccagcctgggtgacagagtgagacatcatctcaagaaaaaaaaaaaaagtagcaaaagcagtgtctttggctgattgaataggtcagggtcactgggtagagggacaaaatgaaaaacacacaaaaagccactggagttagtacttaaaaatatcctaattcgaatgtttcaaccccacggtttagtagaagtacaagaagtgtagaggacataaattagaggcagaacagagccaacccaatttgcagattgctgaagcctaatccttggcatccccaggagatttatatggtgcgagacgtagctgagagttaagaaaccaaaaatgactgaaggagcaaataaacatattcagagaggcttagccaaattgtaattgtagagagagatgatacctcataactaaacaccatgaaacaatgtaaaatgtaatcaagtgaaccataactgtcctaatgaatctgctttggaactctagcatttcatattttaggataaaatggagtattcttatataacactatgttaaatggaactattttaatccaggttttgcctgggtacccaatacattaaatgtgccatttaagaatttggtccaagaccccctttcaggagtacaaagatttgcacacgaactggttttgtgactcttaagccctcgcccatgtagaatattggagcaaactgtgtgctatgttctaaatctcgccctctccagaaaggaagatatagggggaggccagcctcttgccccaggcccagagagagaggcttcagctggacctcttgaatggtttaaataagtgtcgtctgcattttgaaggacacaatagactgggacctgactcactctgaaaaatctaaagggcaggttgctctgagattgtggccttaggggatgactgagtatctagaaattgtcagggcggaggatacgtctgtttcccgtgaaccagatgtgagccaggccccaaggtcagttggcatgggttcaacttagatcctgtcctggagagctacttggaggggaaagggacactgaagggagggtgagcctccagatttccagtggccaaggaaggagctctaaacagccagcgtttgcctgcacagaggatacgacaggcaggccaggaaattcccagtgattgttgccggggaaaggggtgtttttctgaggaccccatgaatcattccagagaaagaagagtgtttataaggtttcaaagaggtataaaagatccttatccaacaatgtttttttaaagctcttactatgtcaggcaaccccattacgtatgaataaaagaaatggcatggagaaaacatccctttacctgctgtccatattctacatgctctaaatcataaaatattcagcacccaacattctaacagggatagtctcttctatgataaagatcagtttttttttttagttttgatacttatcgttatttattacaaagcttgtgatttggaagaaaatttgcatttgttaattcttaagcatgataaaatggaaagttgggtcaatagctggataatttttagagactagtaatcaaagcaattgtagagttagctatttgattggcattgcgcagaatgaaaagcctgataaagtttacttgtgtagaaagccacactggctgcccagaagctaactctttgggcccaaattttactcttctgaaaaagaatgtgcatctatttcatatgtaaatctttcttccctctcctcccttctcctcccctccatcctcccgttccttcctcctcgtctttctcctcctcctcctcctccttttcctttctctctttctcccctctttctacccctccaaccccttcctctttccctctccttttccccatccaaacttagacacatgcttacttgaatctttattactatattagatttctgtgtttcatatctagaatgctcacttctagctctgctggaatggtatagctaaaggagaagcagtgaagattgtgggccaaatgcacaatcgttgtcagacaagtatctcaggatgttcccaataccataattttactttctgtcccgtcataagttagggcctatttaggatttgttatggaagctggtatgtgattattcattgatttactcaatagcgcactgtgtaagtcaataaatctttggtccctaaactggtggtgtcttaagaagcagacttgaaagcattctattgccttatcagtttcctgggaggatatctgaagattaaaaactgcagtcaaggtaagcatttgctaggaagttaattattggtatctctgaaaatggaggtactggcatcatgcaaaagaaaggaggaacgcactgattgagttgcttgtttaataaataatagaggattcacaaagcagcaaatgtagaagagatgtgatgggaaggcaaaattcctttgtgaggtgtcacttaagagagtgctgattggtcagaagatgagtataaactgagaggaggggctgtggcaggaaagggggaccctgggtgttaaagcccaaggcgatagagcacatgctgaatgaactgttatatccttgccctgtgacacattcatccccaggaacaaatgtccagggaatcttgtgttcaaggtgatttttcaagtgtattgtttattatttaaatgtagcaaatcacttaatccagtgtaatcagtatgtaagaattgccgtgaactccctcctgtcccagtagctttgttagcatccttgagggctgacagcaaacttaatcaggccagcttgagtggaatggctttgggtgatttgcattctgcagaattgccagattcctgtcctctaacacaataatgagtgtttccatccagtggtgtgaagcatgtggaataattagctctcagcgttaaagatgtgactagtaacgtccaagcctccttcctcttaagagtatgattttcttatggtgacattttcaagaggacatccgtaatctctcattttggggacagcaggaaagagatgtgcctggatatatcctatcagtgttcgctgattcgccttcagctaaatcatttaaccagaccaagggaactgagatttgagaagctcagttgtctgtaaatctaatggttcccaacttacaatcacttcagatgttttgaggggtctgcagcctcttttatacatttttaaaagcctaataaaaaagctaatggaataattatctatcagtaactacataataagttcagtttgttttggagatcagatctttcaaatcatccagtttgaagggaaagaataaaaggagtctatgagttacaaggttggtgagtatgattagtcaacatcaatttacaagtaatggtattcctactgtggtgaaccgaataatggtccctgcaaacatgtctctgttctaatgtctggaccctgtgaatatgttgttacatgtcaagtgggaattaagatttcagatgaagtaagattgctaaccaggtgaccttgattgagatgggcaaattaccctggattatccgagtgggccaagtgtaatcacaagagcccatttaaggcaaagtagagtgtgagagtcagagagtcattgaaggatgctctgctgctgggttttgaaaaagagaggaagggaccaggagtcaaggaaggtggacaaaatagattcttccttagcgtctccacccagctgttgaatttgcctcctgggcacacaggaagtctgcatgcccagcccttcacatccaattggggccatgtggaatgtggcccaggtgatgttgctcagaaagaacccagcccagaaaacaccttgatttgagcctaatgagacctattttgaatttttgacttccataattcaagatattaaattcttgtttttttaagccactgagtttgtgctaatctattaaagcagcagtagaaaactaatgcatttagcactgcatctttctggatttttggtcattttaaataaatcagctaatagtgtctactgggtatctcggcatacaaataactgtgtcaaaggagttggaaaagtatggagaatgtagaataaatccaaactctaattgttgtctacaagctcctgctttttctctccttcctgtctttccagccttaccttatgttacgctgcactctctcagctcccactcctccagctgtctttccattcctcagacttcctgccgtgggcccttggctcatgctgtttcctctgccttgaatacccttattccagatcttccaagaaccggcttcttcccatcttttaggccttagcttaacccttcctcctctgttagtcagaagagtctaagtgctatcacttacaacccaatatcctagtggtttaaaacaataaagcacgtgtccctcacgtcacagtgcaaggtggttggggtgtgtgtgtgtgtgtgtgttgggataggaattgggattctgctttgttccacacagccaccaaccattccagcttgtgacctctctttcccccggtgccttctcggaatccttagcaggatctctgcagtcacctgctgaggagcaaggaatgcgtggaggattgtgtgggctgggcctggaatgaacatcacctgggccacattccatatggcctcacctggatgtgaagggctgggcatgtagtcttcctgtgtgcccaggaggaaaattcagtagttgggtggataatagccctgttctgcccttcctcagagatgcctcttataaccgtgctaagcagatctgtctcattagcctctatgaaaacaccttatttagttcctccattgcactttatactcaataattttttggcttctttgttaattgtgttcctctccaagaccagaagggtgtgaggataggaacatgtctgttttgctcactactatgtgcacaaacctggcaatgcaacatcttgcacagagtagattacccaccaagaatagtttattagtatgtgatgaatggatgatgaatgaatgacccaacaagtgaatgaatggaaagcatagaccttgtctagagggtatccactattatagcaaggacagaataaataggtcatagtcttttacaagaataaatttcaagaagcagccaaaagctttttttttgtttttgtttttgtttttagaaataaaggactttggcctacggttcaaaaagtgtttggaaagtcaccgctctttgggttgtagaatttgagtccagtcttccagatgagcagcctgagagtagcagtgctctccttatttgggttgattaattctgctcttgtatttctgagaaagtgtagaccctttcagataccatcctaactcttcccccacccttcccttctccactcatagaggacaaagcatttggctcctctcctcctaccacctgttcctattaatatattcacagtggcccccggtggtgggagcatgccacctcagatgaaggagttttctaattttgcttctccttttctttcccattgtcattgtcctttctggcttagcatgagctagtggcatgtggcagtctgagaagtggaatgcctaacccaaggaaataaatgatgcataatcaaatccagttgcgtaacttcgggagtttgtgttttcttctgttgattcacgaagatcaaggagctgatgggaataggttctggccttgccaccaaatgtgcttctcctcccattttctgagtagggctccaagggaggtgctgggccactttgccacgcaggctggttgctgcctcatctcctgcaggtgagggtggagacctcgcgggctcatgggccctgctgtggctgttacatggatccaggttgtctagggtctggggaatgctgctgaaggggcccaagtgcctgtaccctggaagcactggccaggcaggactccctgcctcaaatgggcctctcccaccttgttctgtctctcatggggcaggcacatggcatttcctaggtggggggaccaagaagctgtggctggattaattcttgtgaagagtacaataaactacatttaacttactttcccttacttcaacatggttacacggataaaatacattaaaatgaacactaaaatcaagtatgtggacaaagatgtatcaacaggaatgttcagtaatagaaaaaaaactggaaacaacttatacattcacataagggaggagataaaaataaattatgatacatccatagagtggaatacttgaagccattaaaattgaacatgtagaagaatattgaatgaatataatcacattcatgtttaatttttaaaaatcaagctgcaaaacagtgggtaccatatgatcctgtatttgcaattaaaatgtatacaaatataaacaatggaaaatataaagattgaaacgggatgcttagttcagtaaatgggattatgagtgattgttgttttattcttagtgcccaacggtagttcccaaattttctgtatttaatacatatttgttttgaaaggtgatataaaattctaaaatggtattttaaaaattagatgactgtcttagttcatttgggctgctataacaaaaacatcacagagtgggtggcttataaacaacagaaatttgtttcttacaggtttggtgtctggtgaaaacccatttcctgattcataaacagggcctgtgtcctcactgtgtcctcacatggtgggaggaggaaggtggttctccagagtctcttctagatggcactaatcccatttctgggggctccaccctcatgacctaatcatctcccaaaagcccctccttctgacaccatcacattggaggttaggatttcaacataagaattttagggggatgcaagcattcagtttatgacattgactaaattctccaaataattacttgtttattaaaaagaaaactattgaaagaattcttaaacaacaaaacaagtcattaatgtgcaatttaaaaagccccataacctgcttttctgtctgtcctcagtacagatgttttcccttcctactgcacacttaataagtctccgagccttgtagattcattgtagattcagccttgttagcatctcttgtatccagtccctccatcatattctccctgcccctgcctttgtcacctgttgatgggactccctgcctcctggctttcacttacaccgttccattgtccttcctgtcaccgacaacctggcaaatgtgatccatcttaagaggttcaagggccacgtgttctcttggagtctttcctggcagtccccacttttgtctccagaactgatccttctttatgcctcactctttgttctgaatcctctcacagaaccttttaatctctactgcgcttcctgacacttactttgtgccaggtactttatatttctcccgtatcctggctgtatccctgtgaggatcatagccccacttcacggatgagaaaactgaggcacaaagaggctaagcaacttgcaaagacatcacagatagggactaataagattcaggttcaaacacaggcagtgtggctccagcatctctatgctgagcatatatatctgctgctgcttctcatatttctaaggtctttcacttgtctctcttcccctaccacattgtagaggggggatcatgtgttaaatttatctgtatttttttggtgccaagcccaggggctggcatgtaggaatctcataataaacactgattgaatggctatttaggcaacgagtatttactcagcatctgccatgtgtcaggcattgttttaagcacccacctgaaataaataagcaagaaaacagatcaagagtcttgccctcaataatggaggaggggggtgacttagattctagaagaacatgtcaagggcaagttaggtaaatgattgaggtaatatttagatgacatttttactcctgtatccatgcttctctagttctcttcttttaaattttgggtatgatttgaggcaactacagtactggaaattaatacaaatccttcatttgtcatatcagagctctgtaactggtcacatataagcgagctgtcagtggtcgaatcatgactgcctgttgcttctcaatggtttgaaaacagttttttgaaatggcattacatttctcatttcttcatgctcttctttcttgcttatcttttccactttttttctgctttgctccacctgttctcttgagaaaccatctcaatccctcctgcttcttcctacctcattctctccctcccttgcttcttaatttccgttcccctgaaccttgccaaatatgtttttttgaacagttgatcaaaactcatcaagcacaatgtgattttctctttcaaactgtaggtaaaatggagaggaattaatctgaccaaagtgtgtgtcaccacatgccatagattttgtctgggggcagaagaagggaaaagaagctaactttattatagaggtcagagcaacctcacaatgtcgatgtggtttctgatttattgtaacacagcagagattcaaaaggattaatagtctaagtgacctaaataataatgagcgtgcagaagaacatgttcttcaacatgttgcttactgccgtagagagagtggagctctgaaaaaaatttgcttctcctgcttgaagaatacatttttctagggtgtcacttattaagatgaaattgatgtattaagaaactcagactattcccaaataatggcattatttttaaaacaaatggagtcttacaggaatagaaataacctattatacttgcaaaataccagcttaaaatataccaccagaatatgctatttcttcatttttgcctccccacactccagtctccatgaatgcaaagcactctttccttagaccctacattgaattctgatggctatggtgtgaccataggaagcctctgcatttatcagtagtttccctgaatcttgggtaatcatacaactcatatttccagaactttatcttttacatgtattcttttttatcggactctcttccaaacattgtcagtattcctctatccctgtcagtccactcaattctttaattctttcgtagatttccagcctcactgaaccagctcacaagtcacccatgacccgcccaatgccaaaaccaagcttttccctcagccctagtcctcctcagccttccagagataagtggaattcctgggttaatgcctgcattcaggtttttccccaggaacaaatggtcacattttaaggaggactgggggagaaatagtcaaggccctatgaacccaaactgggaggattcccctgaaatagaggaactctggtgtaatgagaacatcttcacagagcaggtgaggcagatgatcttcctgattgagttcccagaggtgtcagctcactctcagaaaaatgcagaagcagccctggccctacccgaggccccacactccctacagtcctctgctgagctctctgttgcctgccaaggtgggccacactctaggaaagcatctcatttagagaaatgctgtctttagagatacagtatttgaccaaccctggaagcaaagattaagctccctaaacccgaaaacattcactcctacaatggtccacttgggaaaattcctctaagagactcattgataccttgattcttgttttctccttcttctcccctctggctcttcgtgttcataccctttatctcctctacagcagagatgggggtcttaaggtggtttatggaaataacttactacgagcgttcatcgtttttagaaattgtacacgatgcaagagctccttggagtcacaggctctcagcctctgtctagggagtgccattcctatttggttagagccattctgcccagtgtattcctggtggcctctttttaaatctcccgtccttagtgcttgccagtatatacactaatgttgatattagcatgggaccatatgatgcagaaattccacttctgggtacctatccaaaataattaaaggcaaaatttccaagagatatttgtacaccatgctacagtagcattattcacaatagtcaaaaagtggaagtaattccagtgtccactgaacaaacaaaatatggattctacatacaatagaatgttattcagccttaaaaggaaggatattctaatacatgccacaacatggatgaaccttgaggccattatgctaagtaaaataagacagtcacaacaaacaatatgattccacttatatgaagtacctagagtagtcaaattcacaaatagaggaagtggaatggtgattttcagaggctggagtgagggaggaatggagattggttgtttaattggccttgttgcagttttgcaggatgaggagagttctaaagattggtctcacaaccatgtcaatgtacctaacgctactgaactgtacacttcaaagttaagatgataaatttgatgtgtgcattttgtcacaatgaaaaataaaattaagtgtaaaactattttaacctggaagaggaattagaaagtaacatcaccaccaacaaaaatattcaaagaaggtattaattcactgaaaattccaagaagtgagagttcactgagcagggaggcagagcattcaagatgaccatttaagatgaactgaggaggataggtagggatccaaagtgaaatggaaacagtttttaaaaaattacttgcatttccactgaagggtgaataattgagcctttactgctgtttatttttctagcgtcttataagctgtttatttatgtttaattatatatttgttttatatatatatataattgttatatttaatcaagctgccacttgattaaaacgacatcttgggtttatgtgggcaagagaattccaagtgccaccaaatccctcagaactaattacactgtaaaatatcagcatcctcaatgtagaagagttaaccttactgtaatttagtattcaattatgaaaatattgtataatatcctgaattcttatgaaattattatttttttcatatttctgggaaacaaagcgatgtatttatttctgttttgtggattacctgagaaacaagaagatgagacatgtgatactatgtatgcttctagtgcaaggatcttctcattatgaaatgcattactttgtgatggttatatgtgagaggaagaatatgtcaaaattgcctggcaaatcctgcttattttgatctgctccatctttctcagctttggcaagcaagcacaaagattgcaatttcccttgtatgatcccagaaagcagattgctgaatcatgagtcctaacttcaggttgaaggtgaaaataattccttcagggagtaatacatagctacagtctgcagaattaagctgataagagatgacattgcattaggaggttacaataataggatcaccttaaattaagctccctgaatgaataaaataagcctattactctgtggttcacctcagccttgtaaaatgcctggcacatcagaagttctggaaaagtgtcaaatagatgacataaaaaatggggtattctgataatgcagtgatgggatttgaggattatcataaacgattcatttttttttcattcaacaactatttctcaacctctcactttgtgctgggtaccgttctaggtgattcagcagtgaataaaagaaaaaaagttatttgtccttaggaatcttgcctgctaatggggaatacagatgatttttttaaatcgtgaaaatgctaagagagaagattaagtgggaagggagctctaagatatcatggtgtatgctgaaattttagcaagggtggaccatgcataaattaggaaatttctaagaattagaatacacaaaaggctgtggtatttaataccattcacctagtagagcacaaagaccatttgtggggtatgagggaaactgaaatctaggtctcgctttgtcacaaattcattgggcaagccatgctctcccctgggctcagcacgcagctgtcaaatggacaggttgggccatgtgaactccacacctcttacagctctaaagttgtgtgagcattcatgtttctttgatgatcttaaagacccttcaggatcttgcagttcagcacataaaaacaaattcccatgaaacacattttatttgagcttcctggtcatttagattctggataaataggaattttttgccatctatataatgcataataaaatcaggtcttataagatgcctataaacttccatacctttgtaatcattttcttttataatttcaggtaaggcaatttgcttcccttcattagagataagtataggcacagagcaatttatatgagttgattatagtgcattttactataattccatggtaaaaaagcctgattagaatcacatattcactgtagcacctattttctgacacagttcagtatcatgcaggttccttagaaattgtcggagggaatgtaattatccaaaaatgctgaaattacttgttgtaaactagcctatgtgttatggatccatggcttatactaaaagccagttttcaggtagagttgaatgtagctagagctgctgcccccaatgtgacatcaacatttactgaattcatacaaagatgtgtgatttttttttttccacaatgttgggattatacttctaatttgccaaagaaatagctaagctttctagagtatggagtctgtccagataatcttggtatagtctccttttttggagggtgtgtggtagcgggggaatcatgtggtccctggaactctgtatgcaattatttgctctgctgataaaaaaaaatgttttattgctacaaaaaggggtgtaggtagcttgaaaataggtttcgatttagtcattgtactagagttctgggaaaacaaattgttcttttgaatttctgaacaataataatttgcttaagacattttgcacaatcatgataagtaacacatcttggtaaggaagtcttgcattggcagagcatctgtagaaggactgctacacagataatgagcacagttatgtttaaattaaattaagtgggcaccaagggatagaagtagatagggaaggaggaagtaattgaagcagcaaatagtccgaggcacagaaatggaaatatgtgtaaactctgcaaatttaaaagtcacttgatgccataaactattttattaatttctctggagttttaaattggtacgagtaatgatgactgtggaaaaaaaatcaacatatgcgtcagaattggggaagaatctctttgtgtttaggcactttgggaccgaaggatatttcccagatcctcgatgtgcaaagtgtggtccatggaccaaaagcattcagtatcctggggacttaatagagatgcaggatttcaggccctgcccagacctactgaatcagaatctgcatttagcaaagtctccaggtgatatacatgcatatcgaagtttcagaagcactgccccagagttgctaaaacagttcattcattcattcatcaaacgtttttagcacctctttcgtatgccagacattaaactagacaataggagggagagatcattagaaacataggtaagacatggtccctgcactcagggaacatataattgaagtgggacatatgagatatgaggctgaggcaggtggatcacctgagctcaggaattcgaggccagtctggacaacatggaggaggcctgtctctacaaaacatacaaacattagcccagtgtggtggtgtgtttgtacatgttacgccggaggctgaggagggaggatggcttgagcccaggcggcagaggttgcagtaagccaagatagtgccactgcactccagcctgggcagcagaacgagaccctgtctcaaaaaaacaaaaacaaacaaaaaacagatgtgtggtacttgactgtaggatgccagggtggagaatgtagatgatgccccagtgttagccctgggtccatgagtgttgctgtgtttacagaagactaggggttaaagagaatatgtctagccttgaaatgttgggttttgaggcagctgtggaatttttcaggtggaaatgtctagtaggcagttggatcttggggcaaggatcagtaaactatggctgcacagaccaactcctggcctccacttgtttttgcaaataaagttttattggaacccagccaaattaattggcctacatattgtctctagctacttccacacaataaggacagagttgaataggtgcgacagagactaggtggcccacaaagcctaaaatattttctctccagccctttacaggaagtttgtcgactcctttcccagagggttctagagaggtctggaatggagaagccatgtggaattcatccaggcctgagggggctgctgagcctgtcctgggaggatgtagagtgagaagagacaagggcaaggtcagagccctaaaagagacacttcttcacaggctcttattgcacctcaggtagctccctgagccagtcacagtcatttttttcctggtaacttttgctgcagttatttgattttttttttaccttggcatttgcaaattgattaagccaagaaacttgtactagttcagtgaaccaccttgtatctaatttataaacctaaattaacagattctgcacagtaacaaatagctattacctttaaatgaaagctgcaaggaacattatagtttgggcctaacaatagagaagaatctcatcttcccatgaaatagaaaggaaaaatttaatttccttgtaaatttgtttagcttgactcttatggctggcagggctgtgcagaggtgcttatagctcctggaagctccagtttccttaatacaagccccagagtagtgcacaccgcaagctgacttgttctccactctttgtccagttgggaggcagcccctcccctcagacacagggcagaggctaagacgggaactgagggagaaacgggatgcttctgtaggacatggtttcgtgcataaacatgcaactatgtgtgtgaaatttgcacatttaaaagccattgtctaccataaactcttatgtacttcttgggagttttgtaaaggtcttcctgcatgaaacattttgatggaatcatcacaaaaagaaaaagattcaagcatcagttctcagcacgtctttgttaacaaaaataacacagatcgctttaagtactaggctccaagcgagttgaggttgagtgatttctacatgttgaggggaggaggaggagaaaaaagttgtgggtgcaaatcagctcagcaccttcattattggtgcagaaagtcaactatcaccttatttttatactagcaccaaagtgtgctttgtattctctggagccaggcatggtgcatggtgctttcccagatgtcctttaatttaacatcctgtggacactgttcagatacaatgcagctgccaaaattgttgatttatatttgatataaggtcaaagggtccaggagctcttttgataaaagataacactaggttagcatgagatttcgctgtcagattagcactcccgagttggcctccatttccacaaagctactttatttccagcatttctcttcactcccatgggtgcctgaggctgtctgttcacaatattgcagtgttgggattttcttacagggccgtggctcatctgggcatttgtttactctggaaccgagtggcaccaagcccttcgtcacatctagctttttcacagtgaacgagccagtgttgtcgtgaccagtgcctttgtgccccttcccctccccgacctcactggccctggcttttggttatttctgcattttcgtgactctttactagagaaaaatatgtgtaaagtggggaattgatgagtaggttgctggtcatcaatattcagtgaggaactctgctcagcacttacatcagctcactgaatccttccagtctccctgaggagtgtgtccaatagatttctctattaaagaggaagcaacagaggtttagagaagtgaaagcatttccccagggtcaaaaccagaaagtggcagaactagattagaaccacatgtcgtctgccagaccagagcagagctcttaaccaccatgccgagtgacaacatgaacttgagacacaggagaattgggtcccagagccaccaaactgtggcttctaatttttgcagtctctgtctcaagggaagatatccatttgtcaccccctcgccccctgcaggggggtgctaatcaggttgacagagccctgcaggtctgaataacaagggcatccttgcaaaggtttgccagggtggctttttgatggcctccccacagatttgtgatcacacattttctgcaactttattataaaaaattctctttatggaaagagagaaacccgagtaaatatgaaagaaacatcaaaaccaacagagcaatttctaggatatggcatcattcctcactcacatctaacagctagttggatcccagatgctaattggaatagtagtaatattaatgactgttcccaaatcttgttatcaaactgtctcgtcacccacactagatgcctatttccctggggttctgtccttgcatgctttctttctctttgtcctggcactccttccaggatgagggaacatctttttctgtcaggtggtggccacctggtccattctttccagtcttctcacatgttctttcttcctttcacctcatatcctgtttgcaaaggtgaatctgctgcaggcatagagaccacatgggtcccatctcgatttattctcaggcaccagaatctgaatcacttaaaatgaggtccaatactaggagcaattggtaaatttctccctcatgggacattctaaagtggcttcttttaaaacttccttgagaatgagatcgctttaaaacctcactatttattttacaaaacggtctagggaagatgcttacagattgttagcagttctggttgcaaagcttcattacagaaaatagttgaaaattttttcagaaattaagattctgggttatctgtgcatttcatttatacatgcttttctaatattgtccctcttgtgcagacaacccaagatcttattgcaggtgagtagagaatagatttgtttcagccaccatgctaagagcttgctgtgctcagcagtctatagagtgaaaatggagactcacatggaacgcacatgccagggaccgggcactaataggtaagctgatctattcctcacagccatcctctgaaggaggatatacctctatgatcctcgttttatagatgaggaagccaggcacagagcaggtgacccacttgcccaaggtcacccagctcatgagtagtagagctgggatttgaactccagcaatctaatttcagggacagtgcttgaaccgtcttttcttttctttctttctttctttctttttttttttttttttgagatggaatttcgctcttcttgcccaggctggagtgcaatggcacaatctcggctcaccacaacctccacctcccgcgttcaagtaattctcctgcctcagcctccggagtagctgggattacaggcatgcaccaccatgccaagctaatttcatatttttagtagagacggggtttctccatgttggtcaggctggtctcgacctcctgacctcatgtgatctgcccgcctcagcctcccaaagtgctgggatacaggcgtgagccaccgcgcccagccaaacccacttttctataccttctgacagacaaggaaggtttaacacctcctttgcagatcttatggattagtcagagagacatttgccaatctaatttaaggcatactgtgttaaataccataatagaaacataaaatagagtgctcttagcccttggatattttcatgtgttgttaaaagccattttggatctgcttcccatcccagagaattatcaacccctcagataattgaggaaaatgaagtaatatgaggtaaagggctattcaaactggctttgcttgtcagtcaccactcctaggggccaaatggcttttctcacatcgtttcctaaaggctctgtttgtctccaccagcaggtctctgccttccctggaacgaaatgtgtgggctcagtccttgattatggttgctttcaaatgctttgtagcaggggcagtgtcctgcagaaaggtgggatgtggctttaacccatgacaatagagattggtaaagaaccaggttacaaattctaaaccccacacccctgtgatgatggaacagcctttgccaaatctccccaagcttctccagctacaaaatgggcaaaataaaacttctctttctcctcctcctcttcctactcctcctcctcctcacctagtaggagtattgtgaagataaaaagcaataattggtgtgaaaatgccctgagctccatagatgaaagctctctataatgtcaacatatcattacactgactttattaggatttcaatacggttctgtggctcatagaagtagctctttcagctggtcatatgaagtcctaggtctttactccacaaaggaattatttactgcaaatatagtcaggtcaacactattcctagtcagggacggcctagagttagaggatagacatgcctcgatttgggaagcactgtgtagccatgcctaacagcttcttgtaatggggaacgacctacctcctgaagcaacttttggagaccactagtgtgcttccttgtggctgggtgcggtggctcatgcctataatcccagcacttcgggaggccaaggatcacgaggtcaagagatcgagaccatcctggccaacatgttgaaactccatctctactaaaaatacaaaaattagctgggtgtgatggcatgcacctgtagtctcagctacttgggaggctgaggcaggagaaatgcttgaaactgggaggcagaggtcgcagttgagccaagatcgtgccactgcactccagcctggccagagagtgagaatccgtcccccccgttcccccccaacaaaaaaagaaagtgcttgcttgtattggcactggttctctttctctgcagccttggacttcgcagagcacatcaacatctgacctttcagatgtttgaagatggataccctgctcactcagagacattgctcactcaactttcttcagttgtgtcttacatgatgaggttttgaatcctctcctccagacgtattccaatcccagaactacactccaggtagtctgaccaaagcagatggccccctcattattctgctaccacagcctaagattacagagtttttggtagctttgtcatactttactggaacagcctgagggattcttcctgcctgctacataaagaaagaccacagcattgtagtaaataaagtgcttaatagacatgaggccgcctcgccacgtgggagatggagttcatacttaaatcatctcatcaaacttcctgagttaggggtttttcaaaggcagtttagggggaagggtggggtggctgggcttgctgctgattggttggggcagagattaaattatagggggttgaggctgggcgcggtggctcacacctgtaattccagcactttgggaggccgaggcgggcggatcacgaggtcaggagatcaagaccatcctggctaacatggtgaaaccccgtttctactaaaaatacagatacagaaaaaatagccgggcgtggtggcaggcacctgtggtcccagctactggggaggctgaggcaggagaatggcgtgaacccgggaggcggagcttgcagtgagcagagattgtgccactgcactccagcctgggcgacagagcgagaccccgtctcaaaaaaacaaaacaaaaccaaaaaaaagaaaaaaaaagttatagggggttgaagctgtcctcctgtgggttgaatcacttttgggaggtggggggcgggcacaggagtggggttggtgggtccattggagccgtaagtgtcaagacattcaaaacacttgaaaagatatctcaaaaggcccatcttaggttctacaatagtgatgctatttgcaggagtagttgaagttgcgtatcttacaacttctggaatcatggctgataatcgtttacacctgcaccttagcagcacgcatgcatctcttctccacacagcctgatggcctcccattagctttataaaagtgattgaattttgagggagaccttttatcatttaaaccatagcctaaatgtctctcaaagtccgcttggcccaaaagcccaggaataatttagggaaaggcaagataggggttgggttagttcagctgttacaatttttctcactgatagaatttttgcaaagccatttcattactgttagagtgacactgttgacaatctctgcatctgtaccatatgtacccctgctagatcgtgtcttctaacatcagctgtgactttttttttttttttaatttttgacagaaagttacatctatctctcaactgaaaattttattgaatttggtgccaagctattcaggtctttttaaatccacattttgctgtctaatatattaaccaccccctgcaggtggtaatccaagcttctgggcatttattctagaaagagtaaagggtttatttcttgtaaatatagggaagtttaatttgatccactgtacatggatagttttgataagaatgctccctgcttttgattaaatattccctgggataagaacaagaaatactttcctatcaactaatgcatgccctttgtaactctataattgtcaatcatcaagttattgagctacctgtctctgtgtctaaaatgctttgctgaagtcccccttgtctgcttcattttctctggtctctcaggtttgtggattgggttggctcctagggcaccaccatttttgactccctttacagtctatccattattatttctgggatcaatttctagctgagccacctgtacctttgagaattctccctttctcccttttaaaaattgtaggcatttgcctaattccttgattctgtcccgctctgatggatcatgtcttcctcaacagactctcccagcgggttggccatgtcatttgattttcctctaagcccatgacacagtttgcccagatgtgagatttgaattcatttggagcagtagatgttttcgtcctacccattcatcacgccttggggtctgctttctttgttttgtccttggcaatccaaaggcactcctccttagtaggaaagccaatggcagctggaaaaggaattgagcgctctttttgacctccatcagcaccatactatgaaaggcagccaattgtctcaggccttctttgatgttctcctggttctgagcctcacaaagttctttcaaatgttactttcagtctttaagtgaatcttattaaaatgggagtacctctgagaagggttatactttgaaacataatacaaccagtgaggtgctaatatctttgcaaagctgctaactcagcctatgcagttgcaggagtgggtgtggcttttaaaggaaaacaccctgaattgctcacttacggctggtctgaaaaatgtttccttcccaggacactgtacctggcaccactgaatggtgaagagccgcccattttctttaggggaaatgctccatcttggagtatgtttgcaggaactgaagtaagagatgtagctgaaaaaaacttgaattaggagttaggaaaactggaccatattttcatgatctgcttctaaatagactctgagacctctgtgtccttctctataacatgagaacattggatcaactttaaatcatctgtaaggtcattcccagcatgtgattctaagatactttctcctaatcttatcccgtctttaccactatagttggctgtgtgtcctatatgcaagtcacgtcacctctttgggtcttcgtcgattttagagaaattattgtttgtttgtttgtttgtttgtttgttttgttgttgtttttttttgagacggagtctcactctgtcgccaggctggagtgcagtggcgcaatctcgaatcacagcaacctccgcttcctgggttaaagcgattctcctgcctcagcctcccgagtagctgggactacaggtgagtgccaccatgcccagctaatttttgtatttttagtagagacgggatttcaccatgtgggccaggctggtcttgatctcctgaccttgtgatccgcctgccttggcttcccaaagtgttgggattacaggtgtcagccactgcgcctggccaattctttgattttctaaagagctgcattccatggaagcctgggtagaggcaggatggacatgtggagagacatcctgtcctcccttgtccctgttcaccagagcagctccatacttacctattggtcttctgcctaagctttcatttgaagaaaggtttttgttgttgctttgtcttatttggtttgttttgtcttttcctactaatgggcttgtctttgtagtgtccatgtagtgtaatatcatagatgactctgaggaccccatctagctcaaaaattagatattgagctccttgagagcagggatcagacttgtcattctacctccacgatccttcatagagtatagtaggtgttccacaaatgcttgttggatgaatatgtactgataataataattatgaatgagctcttattccatgctaggtatccagtgctttaatgggttacctcaattaacccttaaattaatcctataggatagatgttattctatcccattttacaagtatagcaatggaagtacttaaacttcagatgaatggaggcaacctgatatatctgagaaccaaggctattaatcaccttgctacatggcctcatttctgcctataggacatctgacttaagtcagggatgaggaagctggaaagcaaagccaacaggaagggaagcaccagtgtggagataatgctggagagagggatgatcctgaggtgtatgataaagggctttgaggtgaagtagaaggtcggtttcacagaagtgagctccccagaccactgacataagcatcccttgggaactttttaaacatgcaaattctcaggccccatcccagactgtttgaaccagaaaagttggagataaggctcaggagtttgtgttttgctaatccctacaggggactctgatgtctgctattgagggccattgctgtggatcagcttcagggacttcggttttgcttctggagagtgccgaaacttctagttttctcactgttgagataaaatattttatatctggagcgatatttaattcttttccatttttaagataagcctaagcaagatgtctgcttggactggagactctaagtatccgattccttctttttaccttctgtttagtctgtaacttgaggcccatcacttaagtcctgattctttgcctgtaaaatgtggttaatgacgcggtgctcccatattgggatagccagagaagtgtgtaattagtggttgtgaagcatctggagcctagagcgccgtataaatgctataggataataaccagtttacggccttaaatgctgcctacaacttgacacatttaaaatttcttccttgaatcgtaaagtttaaagttaatttaacagtttggtctttgcacttattttttattcattttgtagccggaatgttgtttctttgtgcttctttcaaccttccagagaaaatgggtaagacaaaaaaagtttaaaaaatcagcaccttcagagaaaataacctctccaaagcataatgtttgattgtcagacatggattctatagacgttttgaacagaaagctgagatactccataggcacagagatagttagtgtccatgaaaatgcttgttctttgagactccagcctgtgagtctttaaagagagttcatcctgggcagcgtcttcatttctgctcggccttgtaacagtgaccctcctccttggatctggaacccgagaagtctgaatcgtattttctacatggtcattctttatttaacttaggcaaacacttccttttttagacaagactgcttgtccaatgtacacactcattttagattagatttgcaagagtacaggctagttcattttactctagttcaaagtctttttttctttccccttagtctcaagccgatgaatggccaaaaaagactgagatgaagatataacaagagcatttcttttgagagtttaacttgggctgaatttatatagagaatgcacatgtggatagataatcagagaaacgtgtataaaagaggcttttataccaacagtatggtgtgaagaaaaaatttttaaatgctaaataaccatagtttttattttgtatattataactttaatactcaagcataattactaggcaggaaaaaaaccttcactcttttattaccatttcctgacattttaaattacacactattgctgaattaaaaaaaaaaaaaagaaacagcagaaaaaggctaatccagaccctgaatcaacatactaatttataaatcgagtctcaggtaaacacggttgtttctccttgtgccttatgctggaggtcaaatgcttacaatagcctaaaatgacaagtcgagacatgttttcgtaattggaagttaaaaaaagaaattccaccatctgttgatgaaaagaaaagttttgcaataactgctgtcatttctgaagaaacatctctaaattcttcagaaaacagtcatggtgcttatgacagctaaaaatcatttggggcaccattaactgattatgaactacctgaagaatcatgctcatacttaaaagggccacatggaatccttttagcagtttcacaactgtctggggttattcattgcagactgaaaaatgttgctttttcaattccaagtaagtcaaaatgaatgggacagcagatagactggaagggaaaaggaggaggaaaaagagactccctcctctgcactttgaagatcattagcccaacccaagaatggcttctgtttctactgagcttgatcacgatttgctatgcactacagtgaaatgaaatagtagtatggctggcaaattatgagtgttgacagcaaacagacaggaagagtttaactcctccttaccttccacactagctttaaaccttcagataaggcaaaaaaaaaaaaaaaaaaaaaaaaaagtcagcaattgggacagtgtgcccttcataatagaacatgggccaaccagagatttttctcattttttgatcacctatcttctctgggcctgtcttttcttatcagatgtaaattatttgtttgcagcatttctgaaattgctgtaagaagatcaatagaaaagtggtgaggaaagaatataatttcaccgccctcactctctgaaagccagctattctcgagtcgtgtgtacttcctgccagttcagtaataattaatgtatagtgtgtctgtaaactgcagaaacagattaagaaataagtgcatttttatcattgtttggatgatcctaaagcgttttaatattatattgtttagtcggcaaatctgtacaataaagaaaacatgtttgaattaggtcatttaaagtttcctcttataactcttaaaacaggaactgtggcttttcagagaagaaatattttccttgaggaatctagatgacagttttctgtggtttctcacttttctgaactcccagagctctcactgtctggactattcatatctcacctttcagtacctattttcatgtgcttgttaattctctttttatgctctaacctggccagactataaactccttgaaggtaagaatcatcttctatatttccctatttctcaaagtacctacgtcaacagctggtcaggttgttgtaataggattttatgtatttaatcacatttactgatgtaacccatttcttattgaaataatgtgttccacctcagtgtatgttcatatcctaaagtcatcttgaaatgtattatgtttcccagtctcttttgtaaaataacagtggcctcattcaacatagtggttcgtagtaaagtgctttcctactgggctctgggtgtataagatgattacgatattgcaccgttgaccttcatcccagtgcacagggtcagattgggtcatttctgtgtgagtacagttgggaattgttaccactctgagaaccttacacagttggacaacgtaagaaaaagagagtcccccgcttagatggtttttatttatttattgcaattaatgaagaattcatgaaggtggccttgctgaaacttgtcttttgaaagtaaatttggcctctgattgaccttccagagacaaattcatgttcttggatgttgtgtataagtgtgtgttttagaaaaacaaagtaataatttagcatcaagaacatatcattgaaattcttagaaatcccataattgcagctgtgtgcaggcgtattatatgaagaaaaggaaaacaaccccttaactttgaagccttgcttgtgctcagaatacatcacagaaaaggaaaggggagagcgttggtggtgttattgcttttatttttagaaaaagtagaggctcagacgaaagtcccgttgcatacagtgagtccatttaaaggtgtatggtatagcatgggaagtttattacagatgtgaaattaggtagtacgtagcaaggatcaatgtttattcatactctaaatttaacccatttaaacatcgcagtggggagtgaatttgcttgtgggcctgaaattctccctacgctgccatgtggaacagagacagagttatggaaaatgtagaaggatgtccaagttccctctccttttgggcaacgtatatgactccagtttataaaaagcaagtcagatcactacaaaaaataaattatcttagtcatactcaggtcttgtcttagcctttgctatggtctagggggtgacggaggacatctgtcaaggccctgtggggacagaaggcacactcagctgggatgttgaagagcagttaatggagggtctgttgacagaggtgtcggcagattgagagaactaagagagtctgaagcatctgggagtggccaagagtgggaagccattcccaaccccgggtctggagggggcaacaagaggaaattgtgttactggagcctggggacggctagagccacagaagaggaactgggacagtggtggctgtagggggtccagtctgctgcctgaactgcagcactggagcaaggagagagcagtacctccggcatttctcccgccaccccctctttcctgccctgccttccattgactgaacctgaagccagaggaaacggaattgaagtagtgtggttggtagaggtcaacaccctggcatggaagagacccctgggagaagcagacactaccccttgtcggagaatcagttcttcccttcaaaatcgggagattatgaacagtgatttttcattggattgactgggagagggaaggagtgcagagggtggttaaaagaacacaagtgcaatgttcccctaagaaatacaatttggggccaggtgtggtggctcacgcctgtaatcccagcactttgggaggccgaggtgggtggatcacgaggtcaggagtttgagaccagcctgaccaacatggcacgtgcctgtaatcccagctactcaggaggctgaggcaggagaattgcttgaatccagaaggtggagattgcagtgagccaagattgcgccacggcactccagcctgggcaacagagcgagactctgtctcaaaagaaaaaaaaaaaaaaaagagaaggataatttgggtgaagatttggcttgtgtgatctgaaagaaaaaaggccaatattctaatatgatttatatccatccaaaggagaaaataaacagcctcatggagcagcggttgagaactcccgcagtggcgcgagactgtccaagctccacccaagcttggccccttaccagctgggctttctggggcaattttctctctgaagctctgtttgctctcttttaaagtagggaaaatgatcgtgcctaccctgtggggttcttgggaggctgaaatgaaaagataattgtaaaatacttagcctggaacagagcactctaaatacagctgctagctgctaatacagacaatccccgactagtcaggttcaacttacaatttttttactctatgaggatgcaaaagcggaatgcattcagtaggaaccgtactatgaattttgaattttgatcttttcccgggctggtgatacggcctaaaatgctctctcgcaatgctgggcagtggcagtaagccacagttccccgtcagccacacggtctccagggtaaacagcccatcctccacagtgtactgtgttgccaagtgatttttggatagtatattttatgttattcacatcccatcatgtctacaaaatgtccatctgtgtaaagtattcaatacttcattatgaagtaggctttgtgtgagatgattttgccccactgtaggctaatgtaagtgctctgagcacgtttaaggcaagctaaatggtgtttggtaggttaggtttactaaatgcatttttgactgatgatattttcaacttatgatggggttatgtggacataaccccatcataagttgaggagcttctgtactctacagagacgacggctcgatcttggcttgggatcctgtctaggaagatgtcctctctgcacagggagtcagaaaggaggtgaggataacggcatggagtattcatgttcattcaaaggaaacatgggctgtagtgggctgagaagcacccacactctctcccttctcacagctcagggagaggcatgcttctgtctccgacagtggtagtctgtggagctgggaagtaggaagtagagagtaagtgaaggatgctaggttcccagcagaacagagctgggctggggtgtacagagcagcaatgggaacaggggaggcacatctagttctgtatcccatcctccacggctgtcccacaccaggcgtcagtggaggactatgccaccataccctgacccgcccttttctgagccaacagctgctaaagcttcatgccggggctgctgttgaaagatgtctcagagccctgctcagagtcttgttctcagaaaatgaccatgctttggagaggagatgacacagtgagtgggagaggtacatgcagctaagagcatttcaggaagaaattggggtctcttgaggaaaaaggatccaaaaaagaactacagatgaaattgattgctttaagttagcccattctatttgtatagttttaaaaataaaaactggaagcaggttggatgaacataatgcgctagcagacttgggaattaggggcagaatgctgctctaaattcaggaaatcatggcacggtttcatattgaacatggtctattcctaccactagcgctttcctggctgatttcttctccagctggagacttctttctggttttccaatttatgctccaccctcaccccaacccacccataaaccagtggctgccggaagcagtatctttcatagtggtgagttctggattttcagcagtaatggccgagagtcagggaccagatgagtgtgtgtgagctggtgagaaaaggtagatgatgatagaaaatgcgcagtgctgtgtgcatggagtcctgcagttctggacattttgaagattacctggcttttgacaatcaatggatttgaccaccttgctataagaaaagattaaatacatctcaaaagccaaatgataaattcaatttcttttcttttttttttttttttttttgagactgagtctccctccattgcccaggctggagtgcagtggcgcgatctcggctcactgcaacctctgcctcccggttcaagtgattctcctgcctcagcctcctgagtagctgggattagaggcactcaccaccatgcccagctaacgtttgtatttttagtagagacagggtttcttcatgttggccagactggtctcaaacttctgacctcaagtgatccactcgccttggcctcccaaagtgctgggagcctaaattcaatttcatagtgactattttaccctacatgatgagtgtagaaaatgttggcatatcaagtcatggcaatttgacatcacaaagccacaatggtgaaaaattagaaacattcttaatgtaattctgtgtggaattctgtggttttagaagtttcagccaggcacggtaatcctagcaatttggaagcccaaggtgggtggatcgcttgagcccaggagttcaagaccagcctgggcaacatggtaagaccccatctctacaaagagttctaaaaattagccaggtgcggtggtgtgcacctgtggttctagctactcaggcggctgaagtcggggaatcacttgagctcaggagtttaaggctgcagtgagctgtgattgcaccactgcactccagcctgggcgacagagccagaccctgtctcaaacaaacaaacaaacaacaacaaaaaaggaagtttcatgcttgtcgtgactctgtcccctaagtgtaacggctagggtcaaaggactagagtggagtgggaaggtcaaatgcagaaatacccctccatgtgcggacaggaagatgtgcaggagtgtatttgtatacttagtgtttgcattgtttctaagacattactgacacccggaatgattcatttcctaagtgttgagagataagttatcttaatcagtggataccttttgaataggttgaatataatagttttgaaaatattggtgacataaaaggcatctaaaaagacatctaaaatcatcagtaaacatttcaatagtggtcaagaacagagcatgccttctttctggagccatctatttagggtagtggtgcttacgggagtggaacaatatggagtcactcatgcattctctgtcatggtgctgggcccagtagaaatgcctattgcaatataacagattaattctgaaaatagaaccaattcctgaaaagccaaaggttgcatatgaaaacctaaaaacagcccttgctggaggctcagtctcttgatctcagacattactactaattggtataaatggtctgataaggcccagagaggagcacccacttcctgccatagagggcatgaagctgtggacataggaagctctcagtaagtgcttcttcagcagacacaagcactgaggataaaggacctttcagtatgttatttagggaacccaaatctagtcatttctggctgttttctttgctttttccttttctagtttttgagttttgacagccagatcctcaccatactagttggtagtctgtactagagcctgcatgtgtcaggtaaggcactctgcaaatcctggcgaggaaggagacttacaataaactcgattgttcttttcctctttaatcagatctgccagcttgtgcctgactagtcctgtcaacattgtgaacagtggagatggtttgcctcagttgcactgtgcactgtaaaagcagtaccaatggctgtgcagacattcctaaagagaatcttagttttcttcctccactttaatagtggtcacccagtgggttgagcaaacaaacatttattgagcacctggtgtgtacaagcattcggctctgctttggtgctgaggagagtaaagctgccagggaaaaccgaggggacacacggacagctccagtggggtagctttgcagtgggactcacacctcttcattctaccagaagccagaagatactcactggggacagtcgtgatgggagtttttccatgagcagcaagagctaatgggccgtttgcctacaagagaaggtgggacagcagattcctcctggagaatctcccttgtggccctctcattgccctctgacagattgcaagcctgaaatctgtcagctttgaaagattgcctgaccctccagtatttggctatgtaagacaggtactgaaagacggcttttgttgaggaactgactcccaataaaaatggttaactatccagtgtgagaaaacacgccgttgaggctgggcatggtgacccacacctgtaatcccagcacttcgggagtcaagggtgaggatcacttgagcccaggagttcaagtgcagcctgagcaacacagtaagactctgtctctacaaaaaaattcaaaaattagctgggtgtggtagcatgcatttgtagtcttagcttcttgggaagccaaggtggaaggatttcttgagcctaggagttagagaccaggagttcaagtccaacctgcaacatagtgagaccctgtctctacaaaaaaaaatttttaattagctaagcatagtactgcacacctgtagtccttgctactccagagtctgaggcagaaggatctctatagcccaggagtctgagtttacaatgaaccatgattgtgccactgtactccagcctgagtaacagagcaagattctgtctcaaaaaaaaaaaaaaaaaaaaaaaaaaaaaagcttcacatgcaaaccagaaagtctccttgcttctcagaatgcttgaagtgaaaacaacaagcattccacctttctctccctccctggcacagggcctggcaaactcctactcatccgtcactgcccagctccaatgtcatctcctctgtgaggtcttccttgttagcttcccattcgcccctgccaggaacctggctcctgtcttccggcacccaccacccttgcatgcactccttcatacactcccctctgcttgcttcccctctaggattgggtgctgcttcagggaaaggactttgtcatctttgtgtacccagtgcctaacttgggatcaggaatagagtgatgggtaaatgtttgttaaatggagagaggagaacatgaacaaatgatcttttataaaggcacaggtgtgtaaatatacaattcctccttatgaccgtgctgctgaaaatagataaacagagggtaccagtacaaacagcttcagacaggagctaactattaaggaaaggtttgttttaattttagtttcagactctggtagtggaagtaggaactttcacatgctgcgattaggaagacaaatgtcccactgtgcaaacagcaagaggatatgactgctgccagcacgcagtacagctgtccccaactctatgaagacatgcaacactcataacagcagagtgcggagagggggtctattcttctcactctgttatgtaatgtgaatactttctcttgcggaaatcattgggaccacttgttgtttgccttactcttaaccctttaatcatagacctactgatgctgtcacccaggctgccacggggtgacaggaaagctttccttcctgcatacatttgttcaagcatttggcatggaagtgataaatgcatgctaatgcagagcttaatgtggagctttcagttagcatcttgcaggttgtgagggattgtttcggctgttgggtccttactcttgcttcttcctgtacatcacagacacgcttcctgtgctgtttgttgctctgtggtgtggttgatggggtgtctgaagtgttgctaatgcagtgcgtgtgatctttagaaatattttccctgaagttatttttaaagcaagtgataagaaaccacagaacaccaaaacccagaaggaaaggaaaactggaggctcccagtctcaggaggcttcaagaatcagagccaactagacagcctgactgggccccatctatttttactggtcttacagtaaggggtaaggtttaggttggaaatagatgaaggcaggcttaatatacttacagagagactgaagtaacagcttgaatgttgtgacataaatgagtttgattgctatgataaaatatggtaggtcagtcttcccaagatgactattgggtgtacatgttactggccataatttattcttatgggatacaaatgagttggccaactttgggcaaggcaccatcctctgtgggcttcagattccaagtctgtaagatgggataagagtacccacctcatagtgctgtttggaaatgaagtgtgataatatatgtgcagtcctaggacattgcagtgtctagtatgagagacagaattttgtaatgaagaaaagtatgcttttcagatccggacaatgctagatttgaatattcagcttcactatatgattaatatatgtgattatttatgtgattctgggcaacctcactattcctctgtttatttgcctgtacaatgggactaataatacctgttttataagctggttgtgagttttttgtttgtttgttttgccacagagtcttgctctgttacccaggctggagtgcagtgatgcgatctcagctcattgcaacctccatctcccaggttcaagcaattctcatgcctcagcctcctgagtagctgggattgcaggctagtgccaccatgcctggctaatttttgtatcttttagtagagacagggtttcaccacgttggccaggctggtcttgaacttttgacctccagtgatctccctctctcagcctcccaaagtgctgagattacaggcatgagccactgcacccagccctggttatgagtattaaataagacactgcatacaaaacatctaacaacgtaatgaaagactattaataaaggctaagatatctacatgatatctgtcaaaattatctttcacaaaaggaatgttatcttagattttattttatacaaagcctgtcatactattggattactcagttaatttattttgaaccctcaattacattctggaaaagtcacagtagacttgaaatgatgttaatcagggatagttttggacctttgtagtggtcacttcatggaatcatttttaaaaaaggaagctaagaaatttaacctaggtatatttaaacaagtgctaaatgtaattgtaaacaaccttttaaaaagtttgctatacttttttttaatgtaaattatgtaaaaggatataagtgaaaaccaaatctccctacctctcctgaccctcggccacccagatctcctctgcagacagacacaacctcagcccttagcagtctcttccagacctgtttcatgcactgaaaccccgagctatgcctcatttttaaaattgaacatcttggagagctttcgatattagccacctcattcctttttgtgccttcatagtattccacagcagattttaaaagatatctttaaaaagcaatataacaatattgttttttgttagccatattataacaatgctagccgggcacggtggctcacgcctataatcccagcattttgggaggctgaggcgggtggatcacctgaggtcaggagttcaagaccaacctggccaacatggtgaaaccctgtctctactaacaatacaaaaatcagccaggcatgatggcacgtgcctgcaatcccagctacttgggaggctaaggcaggagaatcacttgaactagggaggtggaggttgcagtgagccaagattgcaccactgcactccagcctgggtgacaagaatgaaactccgtctcaaaaaaaaaaaataataacaatactgtatataataatataatatatatgccaatatagcaatataataaggctatgttgtggagaccaccttcaagatgaataaaatccagctgctcttatataatgtgaaagtgtgactgtaagtggataaagtgtccagtggcagcattggacagggactttacaattttttttctttcaaaagatcaaggaacaagcaagcatgatgtgctgtgggaaaaaatgtcttagatgactaaaaatcatttgaagctcaaatatacatgcagaaaaattgaagttgttccatgaaatcgagttgaagaaagcaatatttctaaatttgtgtattattttaagcatgagttttaatttgtacaaataactgaattaatgaattcaggtatatatgcctatttgaattaagtgttatgagtaaatatctgaccatttcctttatgttatgaaaagtttttatattcagaaatcttttgggggaagatctcatcaggaaaatgcacactgccttctgcagggggttgcttgggggggggcctcaatatttagcagccctgaacaaacaaatcaaacattgcagagcaggtccaggctgaagtggcactttcattagtaagggcaggcaggaaggctattagccatgtgtgcttgctaaccactgagcccccaaattaagcaggtttaactgtcctccaggtgctgcagagctagaccaccaggaaggcaactgtgtaccaactggacagtgctcctacgggctggcacaaagccaagagacaaattgctcccacctccccagggagaaaatataggacaagatagaggacaggagttcacctactgagtttccctcacaggccaggagtgtgttttggcataaagcatgtcctcatttagactaattctcggcacatatatgggacatgtaggtaattccctggcacataaagggtgcgcttgtttccttaaggaaggaagaatggcttcaccacaactgctggcacccacatgctgccttagaacttttgagtcacgtcaaacagcttcaatcacagggtctgggtaggagaatgcagctgctaggcgactgagaattgaaggcgtccttgagcttcccaccaggagagcgcttactgagtgtctagccccgtctctatattcacagatgggaaaaccgaggcccatgtgggtcaaggttgagggagtagccccaaatcacccagaactgagagtggagctggggcaagaaacccactgtcatctttcaggttcttcttggttattgacaagagcacggttttctgccttgttctcatccttcccctctctagagctccctccttcacgtgtggaggtacagtcggtagccctctgatagtccgtccagttccactgcagtgggctctgatttcagcctgtaagacaaacaaggatgtggcaagcatgggccagagtgactggctgccgacatgcccattcttgatatgaattactacaattatattaaccgcaccaattgttatggatggtgccagttgcgagaaatgactgtgctagatcagagagcccatttgttgccaggccagcactgagcactgtatctgtataaatagagatcaatagtatctctattgacaatgaaatctggggaagagttgcaagtagtacctgatatgcagaggatccttgaggaagaacagggagggacagaaagagggagggaggagagaaggatgggagggagagagggaggggggcatctcagttagtgagattttactttatttgttctaaaaggtggcagaaaattaaataatgtcatgagttttttctaattctctagtgctgttttctacaatgttcaaaccatgttctatcattgaagcagaccagacatgagaaagaactgaaaatttcactttagcttctgtactgctgattcctcctatgggactagggtcatagggagaaaaatcaatggactccagagccaaacagatctggatttgaattctaccttttcaccaaccatgtggccttgggaaagtgactataatctcttttagttccctcatttctaagagataaaaacataccttcagggacctctgttccatgcttcctgggcaccctgaactttgtctttcagaacgctttttgtagtttcttacaatcacttgtttgatgttcatttgcctttgttgctggactgaaggcaccttgaaagcagtgactggatctgcgttggtcgcagctatatctttatcctgtggtacagtgcctggcacataagtatttgctgaaagaatgaatgggtagatggatgaggggatggctggatggctggatggttagatggatggatgaacagatgaatggatggagagattattcaggaaagttataaagatcccagataatgtatggaaggggactatcccagaatctggaataaccaggcacttaaaaattcctttccacttgtagtggaggacctcagcttctcttccatctctacttcaggactacttgactccgaatatactatggccaaaaaaatatttcttggcttgccagtaataacaatgccagggccatgatctatgggttgctttaatgagaggtttgtctgtcattgccacaaccatcatatatctgaagagacacaaatgcccacagtgaactcaagatgcaccaaaaaatatatcattatagtaggagaaaatgctggctcttctaaatggaaagagtggagagctgactggggatatatctaaattttctccttgtctaagagctaacctcttcaggaaggagatgaataaaagaataactattaagaaataactgagtaaaataatcttctccctccattctagcagcactttaggtctgatcttgcccttataacactccgctttctaccttgtgttatggtgatatgtacatgtggccaggggccggatacccagcaggcagtcagttagtgctcattggatgaatgaataagttgatgtcttatttcttctcctaactgattcctgtggttagattctgcatcttgcctttatatctgcacccatgtctagtgcactattttgtgccagttagggcgtaagctctgggtaaatatttgttggatgaataaatgaatacccaaaagggcttcttctggaggaaggccaggaaaacattcctttgatgaaaataatttgtaaagaggcagggagctactggaaggcaaatgtctggggaggagagacaggcctctaggttgaatagaagtagtggtggtgaggttgtctccaaagaaagcaggggaggaagtgtgtgaataataaaagaggaaattgtccaccaggaaagcatctccagctggctgtgataaatctgcattttgtaccagcaagtagggagagtgcctcgggagagagggagatcagggacatggccagtggtttggcaaaggtaatgacgatgataaccaaattgaagctcctgtgtcttttctttccctcaaccccttgtctccctgtattgccaccatttgctttcatttctccatcaaacctccctcttacaagctctattttctcaatttctacttgaccttcacatcacttgcctgtggcttccacccataccccattgcaaggtcatgagaaacccccatgttgctgcagcaacagctctctccatgtgtatctcactggagcagctgctgcctctgttaaccacttccccctttttaaatgtcttgtgctttgcctttcatgtcgccccatcttggggtttctctcctatcgctctggtctctgcctctttccctcttcttctcatcccttcagtgctggtgctcctcaggggctctgtcaaagccttccctcccccactctcatgttccccctgtgtcatgtcatctactttagtggctacagctgccatatgtatgctggggtttccattcctggatctccagtccaggcctcttttctgaactgcaggtctcttagagatgttcacttggccattcctcagccatcgctttccagcagcaaaagctgagagccttgctgtctgccaggcctgcttctcccctggtctgcccctttctgtgaatggcatcactacccatccagatgcttaagccaaaaaccattcatcttcctctgcccaagccagaagtcatgttccctcctttccttccctgtccatgtccagcttgtcatcaaggcctgtagattctgtcttctccgtgtccttcaagtccatcccattttctccgtctccactgccaccattcaagttcagatcattaatgtcaccttcctcggttactggacagtcccttgattggtctcactgcctcttctcttctctttctcccatcttctcatcctccagtccactttcactctcaactgcaatgatccttctcaaatacagtctggactctgtattatccccgcttgcattttccctgccctttagaagaggtaagtccttagcatggttgtaaaacgcttaattatctggcccctacttacttctttaatataatccctcacccctccaaaacaccctctggccacccatccagacacaacagagcctgtttcagccagcaagctgagacacttctggctctcagtgccatgtcctgtcttgcctctggttcctgcaggccacacctcagcttgtgtatcctccaagagcctatccatccacatagacactccttactgtgggcttctgcagtagatgtccaggcaatagcctatctgcttgactgggctccacgtgctgtggtaacagaacttactcttctctttgtctttggggactttaggccttgctcttaggtttcactcctctgagactgctcttgaaggaccctggacagggctactcaaggcagaggtgatccgtcaaggtgtgggaagagcctgactgcccctgccccatgcagccttccaaaggctgaggagtcctaccaccatcaatgctccttgtatgcatcctcttgctatgttacagttgccttgttatttgtttgggaccctcagaagaatgcaagttttgggtttctgtcttttacttgtccaacactttgagcacctgctgtgtcctgggatacagcagtcatggccacttcagttgtgccatttgtgcctagctgagagggcaagtgggggctgaacacagcctgggctcccctctccaggccacatgctctggcttggggctctgtccctcagaggaaacatcttctctacacacaggtgctgtctaattgccaagctgtacacctgcctgaaaaagacagctttttctaattcacaaaaagtacccaacaggctaaggctgacccacacattggaggacaagataaataggttcctactctcacagtgctatctgtctagcatgggaagacaaaacgtaaacaaagaaatatataaccacacagcaaaacgtttcggatggtgaaaaggctctacagagaattgaagagagtatctggggaaatgctgtaggttggtgggtccaggaagatgtctctgaggagccagagcatttacgctgagatcccatgataaggaagccagcagtgtgcacgcgagagggaagagactgcatgacatccctaagactggtatggtcttggtgtgttcgaggagcaaaagaaaagccagagtggatgagggctaaagggcaagaggagagacaaatgcgatgaccaggggatgctgaccgggggccagatcgtgcagagtttcgtaaggcctctctacctgttcaccgtattgtgcccgaggactggctcgttgcatttatccaataagtacctgttgaatgggagaatctcatcatgcctctgtgtacagaataagtagctcaagacagaagctccatgtggccccggtgccctctagtgaccacaggctccagcccaaggccctccatggcttcatcatcttcagaaagtcacttacttcccttgtctttggggcccagcctcagggtccagcagtaattcctggaatttgtcttactaactattctctgcaagtgggactcaagcagttagaaaaatccgtgctatgagtttcatagtcagactgacagcaggccttcatcccttacccaagcagagtttccaaagagaatacatggatgtctaatttctcaggggagtgcagggaaccagcattagcaagcaaggtctctaacagccttcagatctgggtgttttgcagcagtcaggatgacctccaggtagtctcgcagctcaggcctggcaccatttggccgtgctggcctgacaagatcatagctacaggctgtacactctgtccatgaggacgtgctgctgaggacccaagcgtgggcataatgtatgtatcaaagacatattgtagcatgtgcacagacacaacatcccactcctgctgttgttgtttgctttcatttggatcccaacccattctgggcccattaagctaatcacccaacaaattctgaactgtcatctcatcgtgaggctgttccatgcttgactgaaaaacctgttttcacccaacttccctggaagaagcctactgcagcccatttacaaatgtatgcatcagtaaatcaaaagtgacagcacagatctggcttttctgggagaggggatggcagagggagaaacccagtccttcccctctgtttcttaaatgatgccatatacacagctttatttgaaatgttctttaaaaataggtcatcttcaacttccttgatagctcattctctacatcggtgaaactttggctcctttcattttccaaagcctctacctgtgtttttctgtgagtcgagtcatcctccactgagccgagtgaaggaatctggctctcccagatgtttgcaggtatttcctcttcagttgtcactttgccaagtggagcacatgtgttctttaatttttcttcattaatcagtctccaaattcctttacacttgctcctcaggtgattccatcaaatcaacatatttctggagctaaaaatgcctggaagaatacagccttccagctgcagccatccaaacgtgtggattcgcgtatgttccctgcactccatggccatatgtttccacaggttcacttccaggagcgttctgtgtctccatttgcttccctgcaaatgcatacttagtctcatctgtgagttttctaactgagtcttaaggcatcaaaaattaagagcatattgataacagcccagtgttggtgagagagggtgtggggaaatgggcattcttgtacccgttgctgagaatttcaattgacctaacttattttgaaggccattttaaaataaaatgaccttttaaaataaaaaatacagagacccttcacccagcagttcaacttccctgaatctatactgcacctgtatcagtgtggcattgtttatagtggactgtatcagtccatttccacactgctataaagaatgcctgagactgggtaatttataaaggaaagaggtgtaattgactcacagatctgcatggctggggaggcctcaggaaacttacaatcatggtggaaggcggaggggaagcaggcaccttcttcacaaggtggcaagggagagagagagcaaagaaagaagtgccacttttaagccatcaaatctcgtgaaaactcacccactatcatcagaacagcatgggggaaaccacccccatgatccaatcacctcctaccggggtccctccctcaacacgtaaggattacagttttcaagatgaaacttgaattgacgcagaccgaagccatatcatagcccaaagtggaaaatagtctcaatgtccatcaattagaaattattacataaatgaactaagtatattttgctatactcatgtaatggaagtccaagcaacagttataaaaagaaaataacatagatctatgtgcgctgacatggatagatgctaaaacaatatcatgaaattcaaacagcaaattgcagaacagtatgtatggtatgaaaccatttttgtaaatttttattctagctattcacagaacaaaatctggaaggattcacacaaatctcttaatggtgcttttttttccccctcaggttgggaactttctacagtgtacatgtttaaattattggactttttctgtttttcagcaatggtgtattactttaaagttcagtaaaaacaacggaggtattactttatttttgctgtgctcttgaaccaggaagatgagcttttatgccacctattccctattgccccgattgttccctagtctttctcagacatggaggagctttctgtaggctaatcccagaattctttgttttccctcaaagaccagaacagcagcatcatctttttggggtttagttaaaactttagcacgtaaggttttcttaaggtggctttcaagtcttaacctgcacttccaggcccctttaacccgcttttctttcctcttcttttcttttcttaacatgttcagattctttatggattatttcaacggtcttattacccattttttaaaggttttgatcattttctaagcatctgtatcttccccctccttccccatcctttcatgagaggagacacctgtttcccagcctgcttagaattactcgttgatatttgtttcacagaatttttaaaagagggccaaaggaatcggacatgaccttttgcagcagaaataactgtcttttgtctcactcctagctcttcctgcacgaatactgtacatgctgtgtgtgttattacaacagttatttttgttgggtctttttatatctactttatttttgaggtggtgatttatttagtcagtgtacttttaaaaaaaactagcactcctacaaatttatttctcattatttttaatttttatataagcaatatatacagaaaattgtaaaatacaagtaagcagaagaagaaaatagaaatcacaagtatttttactatcaggtatagcaagccttaataattgggtttattgcctccttgataatttctacatatatgaatatttaccttttcttaaaaatgagattatatttaataaattattttataacctgatttgttaatacttaacaatgtagcataagtagtttcttatcattaaatgtagataataacagcaagtttagcatttactgtatgccaggcatgagactacacattgtatgttattttttctcctaatttatcttacgcccacccttcagtaggaaattttcttatggcactctttatctggagtaatctctcttttgttgttgtcgttctgttagtctcttcttttttagctttctcctacacatggctttcatgaagtgaaacatatttgtgattttttgtttacagattaagcattataaatattaacccatccagtgctcatgacaatgctgtatgttgggtgatattattactctcattgtatagattttaaaaactgagatacagagaagataacttgcttaaggtcacacagctagtaagtgacagagctgggttttaaacctaagcaatctagttccggaggctatgctctcaaccgcaaactctcattttcatgactaaatctatgataattatttcaccactcccttctttctgtgcttttaggtttactcttacacacagcagagcgatgaacatcttgttcatctatatctttgtacatgtgttcaattactaccttaggctagattcccatgaatagaattgctgagtcaaaaggttgacgcattttttaaaggttagatacatattagtcaaagtttttaagcaatatgctttctaagcctctttgatctttataattcattgttcctttctaaaaatatataactgtcttctgcgttcaaggataattttttttattaatatggggcttcttgttctacttcctcccctttcgttatttcttcaaaatgtttaacaaactaatacatttccagaacacattatgcttcatcttgtcactatttccagtaccttgtatctcctggactttatgcaatgcgtgtgtgtgcacagatggaatatgttccaccatttggcttaatgacaatttttcacaccactaattttctttctttattttattttttcttttaagcctcacaagaattcaagtaacatatataatagttttgttttcttgatttcaatatatgtaaatttggggggactgcctggcaaggatgaatgatgtgtcagaggtctagaagacaaagctctcacctctgcctctaacttgttttatgaccttgaggaaaccacttaatcattctgcatttcattttcctcatttgccaaatgacaaagtgaactaaatgaccttgaaaacctattttttttttaagtgtcagcctatccaagacgcaagttgatctttgaaaagtattgtttgaaattagggcaaatatgtgtgtgtgttggtggggcagagttggaggcactaaagattagtttcaacatattaaaaatgttttgtgctctgacgcttgaccaaggcctcctgacagtgtgctttagtggtttgtgaaacatatttctaaggccaaggtaattatagttgttccactgaagcatgacaaatggcccctcactttgaattcttttatgggaaagaaaaaccttccatgacaacagccctggaacttaatgacaggctccagatctgggggcaagaatagagacagacattagctgcagtgaagagagagaagacaacagcacgggctcacctgggaaggatcagggcgaggtgatgtaacaataacaacaactcattaatgacattagtggggctctgctgagaacttgctattgaccggacgttgtcccaagaatttcatatgcattgtctcatttaattcccacaatgcggccgggcgaggtggctcacgcctgtaatcccagcactttgggaggccgaggtgggtgaatcacgaggtcaggagtttgagacaagcctgctcaagatgatgaaaccccatctctactaaaaatacaaaagttagccggttgcagtgatgggcacttgcaatcccagctgctcgagagactgaggcaggagaatcacttgaacctgggaggcggaggttgcgatgagctgagattgcaccactgcactctagcgtgggcaacggagcaagactccatctcaaaaaaaaaaaaaaaaaaaaaaattcccacagtgcccctaagagatagattatgagataggtacttttattttttctgttttacaaagatgaacattgggaggttctttaaaaaagaagctacataacctcctttgaattatttagccgttagttgtcagagataggatttgaaccctgagagttcattcattcatttaatacatttgttttgttttgttttgttttgaatgcctgttacacgtcaggcacctgtctaaaggctggtgacgcagaagtgaatgaagcaaaattcttgcttttatggagtttggctaatagaggatgagagcagtcataacaaaccaacaaatcaataaataatttcagagggtaatagtgccgtgaagaaaaatcagctctctgtgaggagagtgactggcatagggggaaggccactttacaggaacctggcaggtagagcccctgagtgatgacatcaagctgagccctatgcgatggagccagtgagccatgcagcgatctattggagggcattttacctgcagagtccatcagagcaaaggtcaaggactcgaaagagcttggcttgttttaggaacagagagaaagccagtgtagttggatgataagtgaaaaaagggaaaaattgtctacggtggagtcagagaggcgggcaggctcccagtgatgcaggacccatgggccacagtaggatgcttggaatttattccatgtgcagggaagaccttggaggattttacaccaggaagtgttgtgatctccagtctctgcaggcagacttcttcctctaggttatgttgccaacaaggagcatctggaacagactgggttgtttacgtagcccacagcctaaaggagtgttaatttaggggccagtgtttcagatgaaacaaaactctagggtttccacagaacaacaagactgaaatggacagtgagaggtcaccttagctgaacttctgactttaggtaagaagaccttagatccaagtggagcatctggactatactaaagatctgcagaaaggggaacttcatcttctgtcttgagaccttccccgagtatatagaaggcggtgctctagatactgaacttgcttgaccacttcttggtctggaggttgtgcttgcgtcatagagtaaacctcatccaaaataagaagacattacagctttgagtaggtggcatctcagggatttgcatttgtgtgcagtctgtcgtgtgtgtgtgtgtgtgtatgtgtgtgtgtctctatttatctttgaaaaaaatatttttgaagatgccttcaacattttaacatagagggccggggcacggtggctcatgcctgtaatcccagcactttgagaggctgaggcgggtggatcacttgaggtcaggaattcaagaccagcctggccaacgcggtgaaactccatctctattaaaaaatacaaaaattagctgggtgtggtggcacacgcctgtaatcctagctacttgggaggctgaggcaggagaattgcctgaacctaggaggcagaggttgcagtgagccaagatcatgccactgcacttcagcctgggtgatagagtgggactctgtctcaaaaaacaaacaaacaaaaaacaaaaaaagcaaaaaacaaaaacgtcagaaatgcctggcatttctgatgaggtggcattgtatggatgggactagaatttgttttgtaaactcatcaacttgcttattttatttgaatgctctttataaactaatactcatgttaacccattgaaattgatttgtgtcacctaagggatgaaattaattggttgtttgggttaaagccttgctattataagacactgttctcttactttgacaaaaatattcagagttcatgaatacattgatttagcaaaacccagtttgaataacatggtaaaccatcactaacgcactgactgtgtgtgtgcctaggtggctgactatccctctgtaggttcttgacaattcaagcctaacagtacagatttgtttgtgtgaaatgagcatgggaggcatttagttgagcactgtgatacagtgggccccagagagcaaggtaataattgtgaaagaattccatttaagctgcacaagtgagtatgatttggggaagaaaaccacccttgagttagtttttatttataaagagcatatttgtttctcaggtggaaaaacatcctcaaaccacctttcttcgtgaatgagttcagaaaagtctaacagccaggcgcagtggctcacgcctgtaatcctagcactttgggaggccaaggtgggtgggtcacttgaggtcaggagttcaagatgtgcctggccaacatggcgaaatgccgtctcaaccaaaactataaaaaattggctgggtgtggtggcgcacacctgtaatccagctactcaggagactgaggcaggagaatcacttgaacccaggatgcgaaggttgcagtgagcagcctgggtaacagaacgagactctgtctcaaaaaaaaagaaagaaagaaaagtttaacaggacaggaacacaaggacgagggtagtctaagggcaggctttgtggtgcaccagcggtagaggatgatgagaacagagtttccatatctaaaggtgctgaactagagaactctcaaggttccctcacatcaacgttctgtagtttggaaaaaaaggatttttttctgctctatgagttagaccgtgttttcccaaggccttatagctgtgagtgcaggacgactctaataactgcatcagaatttataaattcagctgtcagcattgggatggttgagtcgactgaacaagcaggttttctttcattgtctgtttcctagatggatgaataacaatttcagcctctccactttgttgtaactctgtcagtctgacatttctgattgctcagaggtttctggaaattttctaagtcacacgttggagttaattcaaagagataatgcaattccaatggaatcatcagtgtctctgctgtcagatcgagtattttaggagttcagttggttgagttgcacagctctgcagatttaatactacatacttgccgctttgcgtcttgccctcaagtcttcataaatgggctaaaggtctgattggaaactgtgagatgaattatatgtttactatgccaagttaagtaaataccatttgaaaggattactagagggtataatcaagttaattgctttaaaaatcttttttgatttactgggctctatgaaaattgttaagcaattgatctgccatagtacatgagctgaagaaagtggtgctgagtccacaaggtttccatgcacatcccctcccctgtgtctggaactgctccctaaatgagaagagagtccccctgagacccgcatgcaagtactgtggacagactgttgttcctccagagaagacacatgttgacagcttgacgttcaggctgatgatggatttcttttttttttttcattctagatgctgaagaataccagcctcctatatggaaatcatactgtgagtacctgaaatgaaaatctccccagaagtcgttagcaggccagcctttctgaacaattcttgccagcgatgtagtgcacacaagcgttcccacctcacagcactgaaaacccaaatctttctttccactgaggaaaaagattagtcagagacgattaacagagccccctcctcttaccaaggcctccaagaaccagctgtggcccatttcaaaaatgcttagaaaagaggggtggactttctgactctctgcctttcagtttggggctttatttttatttatttatttatttatttatttatttattttttatttattgagaccaagtttcactcttgttgcccaggctggagtgaaatggcgcaatcttggctcaccgcaacctccatctcctgggttcaagcgattctcctgcctcagcctcccaagtagctgagattacaggcatgcgccaccatgcccggctaatttttttgtatttttagtagagacgaggtttctccatgttggtcaggatggtctcgaactcccgacctcagatgatccgcctgcctcggcctcccaaagtgctgggattacaggcatgagccaccgcgcccagccacttttatttatttttttacacagttgatcggcaaggacaaatgtgttgacttctatgaattatgtttttggccaatcattctaaggataaaatatcatatgacatcaatgctgaaaaatgaacagatagcgaagaacctgtttggtcaccaagggtgactcttagaaacagatcctgcctgatcatcagttacccacctagctcccctcgtgaaggcaggcggctatcattgcctaagccttgtctcctcttttcttagtactatatgcttgactcaggaactccccagtgagagagggcaggactgtggtaggaggagcccactgtgtccagagccagggtgcgcaggccctggctcaggctctgcttctgctgtcatcattagcattcctaacgaagctgccagggttaccactccccatcaagaacctgccctgtgctggccaccgcaccaagcagccaagtcccgaattcttaccacaactctcacagatgggactatttttttttttttttttttttttttttttgagacagggtctcgctctgtcacccaggctggcgtgcagtggctcaatctcagctcactgcaacctccacctcccgggctcaagtgatcctgccccctcagcctcccaagtacctgggactgttaaaggcgccatcacacccagataattttttgtatttttattagagatgggttttgccatgttgcccagagcggtcttgaactcctgagctcaggcaatccactaacctcggcctccgaaattgctgggattacaggcatcagccaccacaccaggcctatgtagactgttattatctcatttcacatgtaaggaaaccacggctcagggaggctaagtaacttggtgaagttttcacaaaaattagtggggtagcattctgagtggaacccacagcctgcacgtgtccaagacttgtccattctattcagaatcttatatatacctatgtgcatgtatacacacacacataaatacacatattatgtatggatatataatatatacacacagccacacacacacatatataaatatgaatgtacgtatttgttacaaaagcaatacaaagctacataaaagacagatattagggaaatacataaaacggagagtaaaaatttcccaacatccacaaattccccaccccatattccagtccactctctcctttcccagtagctgagctctgtgaatgtggggagggagatccttctgattgtttaaaagtgcatgcttcatgttaggcatttttgttgttgttgtgtaaaaatggcttgatgctgtgtccttcagcttgcttgtttcacttcacaaacatcttgtttttatctctccttgtcagcacatacagaggcaccttgttcttcgttacataagtctgttcttccatctgtgaaataaaggggctgtgctgggtctctaagggcccttccaatctaatgctctgtattccgatcttctactttgaaaggccgtgctaatgacttagtacttggatgtttttgtttgtttgtttcctaatggagtgtgaagagctctgacagtaaatcaacagaatatctgtagtgagaggcattgggtgttccatgacttactgtgctttgcacactggctcgcgcatggccttgcgtacattaacgacccaataaatatttgttgagagaatgccaccaccgaaagctttgctgaagcgaaaagatggcattggctcaaattcattttgccttcttctaagagaccttgggccacccagtaacatctcttaaaagtacttctatgtcttgaggaagctggaaaatccttgctacttaaatttaacagtatcaattttaacccttctgtattagttttaagtttgatttttggatctaaccaagttgtgtgttttaaaaatttgctctataatcataaaactttacttgcaaaagttcctctttattatatccaactaatagtcctccaggctctatttgagagcatctagtgatgtagctctccaaaagtgaggggagtatgccatccacggcatcaaaaacatgttgaccaaagccctacagaccaccagtgaggaagaactctcttttggtcatcctggatccatgagttatttgagtttgggtgttagaccacgtatgaattatcgagctcatgctactccatcttatttccaagaatatcatccatttgtttaatctttcagcaaatacattctaaatgtcagagaataagtgttagaaatcaacaatgaataaaatgtggcttatacttccctccaatgtacaatctagtcaaggagacagatgtaaaccaataaacttaaaatgcaaatgaattctggtaacaaaatgctactcctctatctcctgggaaagaagactatagaagaggtcaaatttgcatgtgggtcttgaaggatgactaggagaaggaatctgagggccttcatgagatgctttttaaaaaatccaaatatgctaaaatgataccatttcttgatatgaaagtccaacaaagctatcagaatattgaatttgttttattttaaataaactgttggtaaacccgttgtgaaccccagaaattaccaagcctttctctttgaaatgttcacaaattatcctttgagaggttaattttagatactgatgtctaactcattatatcatgtatggattccatattcttccatcacacacttttttaaactctagcaattttcggtactatcaattctctcatatatttactagagacagtatatttttgccatagcataggacttggtttaaaaatttattatttgcaatgattagacaagtaagtagctatgtccttgttttcattgacgtttttttggccataactttgacttatttaatgtcagattcttgttatgaagcactagccccaattatggcattattcctacaagaaaatttgtcttaaccaggcatggtggcatgccttgtagtcctagctactcgaaaaggctaaggtgggagcatcacttgagcccaggagtttgaggctgtagggagctacgatcacaccattgcactccagactgtgcaacagcgagaccctgtctctaaaaaaaattttaatttaaaaataaaagaaaattagtcaatttctaatgatgatttatttatttatttatttattttcttttttgagatggagtctcgctctttcacccaggccggactgcggtggtgctatctcagctcactgcaagccccgcctcccgagttcacgccattctcctgcctcagcctcccgagtagctgggactacaggcacccgccactgcgcccggctaattttttttgtatttttaatagagacagggtttcaccctgttagccaggatggtctcgatctcctgacctcgtgatctgcccgcctcggcctcccaaagtgctgggattacaggagtgagccaccgcgcccagcctaatgattgattttaagaagcggtttctacgttttattcttggctgcaagcaacagaatactactctcaatcacattgattgacttaagccaaaagtgcagaggcattggcttcagacatgactgttccagcaactcaaatgacattaccaaaatccagtgtatatttcttcttttcttggctccgctttcctagatttcaccctactcttactatgttcttcccttgggatccccctgtaactatcaacaatatcagggctgtgcttccttatccaaaagcaacaggcaaagagacagtctactttcttgacacatctaacaaagtctcggaattgagtctcagtcttaattgacctgggttacccattcctgactctatcactgtggtcagggatgtgctgactgccctaaaccaatcaggactcactactggaattcaggaaaggatcaaccccatataaccctgtataacatgattggaaaatttggagtaatattggaaggaggaagatgaaaatggatgctgggaaggcaaccataaatatctggctaagaaatttagaagggtaagaaatcagctctctcaatattttatataaattatagtgttcattaatttagtcactccttcattcaacaaatgcatattaagtctctgccttaagccgggcactgtgcttggagttgggccactaagatggataaggtcggctgttgactcaaggaacggtgatgccacgggatggcctttaagtccctgccctctctgttcctttccttttcttagaaaaggaaaaaaaaggaaaaagcttcatggcttactgagctgtttccataaaataatcttgtcccaaagtatcatacatctgcagctaattcttaactctcaagactgaatacaagaaacattgatgacgtcactgagaaagctttggtttcaatgctctaaaagaagagctactttcaagtttacttaaaaataataataaagctacattctaaactttaagccagaactgtatgaactttatgcctcgagcaggcaagttcaaaagccaatcaccatggttatgctctgaaagattttctttcttaagaggccaagtgccaattaggcagcagatgcagtggctgacagctctccctggaggctcccctgggcagcaggtcactcaggcatagcttgtgcctgttttacagatttgaagtttagagcctcaaaaccctgatctgcagaatccctgcatcagaatcccttggggaggatatttatgataattattcctcagccttaccccagatctctggatcagaaaagtggggggatctgcaatgtatcaaaccccacaggtttctcttatacatacttacgcctgaaacccctcagtgtgtgggcaactgtcatctcctcctagaggtttttcacagtgccattagacaagataattaaatccccattaagactcgacattctggccgggtgcagtggctcacgcctgtaatcccagcactttgggaggccgaggcaggcagatcacctgcggttgggagttcgagaccagcctgaccaatatggagaaaccccatctctactgaaaatacaaaattagccaggcatggtggtgcatgcctgtaatcccagcttctcgggaggctgaggcaggagaatccttgaagccaggaggcagaggttgtggttagccgagatcatgccattgcactgcagcctgggcaacaagtgcaaaaccccgtctcaaaaaaacaaaaaaaattgacattctgttaggaaggcaaggccttcccatggcagggtggagggtggggttgagccaaggaagacacctaaagcacctacaattccctgcttataaggttttcccatgaaaatcgggaagacatgagcagtgagcagggtcatactggctcagcgtcatggccaagtgcctgggttcagctcctgggtccatataccctccttagaaagaagtagactgttagaagccatccctgcaggatctcttaggagctgatggggctggcctgggcttcaaggccacccaggctgtgggctttcacccattagccgtctgattctgttcccagagtgagtcaagttttcttactgaagaaaaagtaaaacagtctgtcagtgagctcacaatttcttaatctgctttgggtttcttggggagttagggagctccacctccgtgttccccagtggctgccacccctgccaaacagcttactctggtgctaagaattctctggtgtgcggcagagggcccggggctgggaattcctggcacatatttgggacattgctgcagaagtaattccatcacgtcacctctcagctcacagaccacccaagaattgacatacattattgcatgtgacttgtgaaatgtgtttgttgaacaaggaaaattcaagaagcaacgttttcagattatgcgataaatttctgttatattcaactctgcctcagagatttttttcatggatgctatagctaaccttgaaaatgatgggcaggctctcatttgaagctaagagaggagattgggccttatttttatatggttgccgtggtaattgattgtcatctcattatctttatagccagccaggtaacccagatggcaaataggcttctgtgcctacttgccaacttctgttgtttggaacagcatagaacagggttttgcagattctgagacctgctcattgagaaataagtcatcaaataatgatgtctactgccgaggggccaggagagagaggtggcagttcctcgcttctggggtttgccttccccttccctcctccaagtcgcccctggctggggattgttctttgttggttgtgagattggtgaattaccaaatttttctttgctaaagctcagagggttcctagagaatgcagctatgggatttagcctgttgacataggagaggaactgtccagaaatgttccatcacctgcatcctttatttgtatagtagcatctcaatctctcagccgctcagggtctctttgtaaaccagtcttgttgattctcttttgaatctctgaggccatcaactcaccttctcatttgcatttgcaccagtgttatcttaactcacactttcacaacctcatctgtgtaccagtaaaacactgttctctcttgcttccttgtctccagtgttccccatgtctgatccctctttcagcaaggcaaaggacagtggctcctactcctggatatgcatgagtctcttgaagagctttaaaaagaacagatctgggggcccctggccggactgggagagtaagcaatgccagagatggagtctaggaatctgtattattttataactcctaggagtttctaatgtgagcagctcctcatgggacctctccaccatctagttaggcaaccactggctgaggctgaaaactacagcctttgggttttggaaatcaaggcaatgaatcttcatttcatcctctgatctgtgtgaccttgagcatcttcaaagctggcaggcaaccccgctaccttattagtgaggggaataacagttaccttggaagctttttgggaagatgaagtgagaagatgcatataatatgcctggcacatggtctgtgcccagaaaagggcagcatttcttcttctgaataaccttatccctattaccaatattttaaaacagagtagatcatggctcctgctcaaacatgtgactgtccctttgttacagacaggaggacagtcacggtccccagcatgtcattcaaggtccagccccacatggccttctcacacatcccacgccctggctcagcagccacactggcctcttgctgaccagtcagctcatcatttcctttccctgcagttcctctttcctctatctgtaactctctctcttctctacctgcagaacccttctaatccttcaggagagctccctgcctcttcccttgggaagttgttctgaccacttgagtacattgaatagcttcctcctcttcccctattaaagtacttggcccaccttggttttgtgtctccatgcatgtcccccatcactggcatctcctcgaaggcacagattgtgacccatgggccattagatacagtctgttcattcaccaaataattaaaaatgtgttcacaaagccacttgagccacacttcccatatatcactgttggtttcaagaggcattaataatgggaagagaaaagtgaacaggattctctcgctgtggattctatagtccttcttagatctggaactctgtgattctaggagatggcccctttgactcctgttacacacacactgtcagtaacattctgctaaaaagcagcttagtagtattgggctgattcaagaggaataaagggacacatatgcattaaacatgtactacaaggctgagcgtggtggctcacgcctctaatcccagtgctttgggaggccgaagcaggtggatcacttgaggtcaggagttcgagaccagcctgaccaatatggtgaaagcctgtctctacaaaaatacaaaaattagccaggcatggtgatgcgtgcctgtagtcccagctactcgggaggctgaagcaggagaattgcttgaatccaggaggtggaggttgcagtgagccgagattgtgccactgcactctagcctgggcaacagagcaagcctccatctcaaacaccaccaccaccaccaccaccatctactatgtgccaagcacagttctagttgctggggattctgcagtgcacagaacaacatccctgccctcaaagagcttacattttaatcaagggagatggtacacaaaataaataaacataatatttatttcttgtttattaattgtgttaatgatgatgagtgctgtgaagaaacttaaaactatataagagaacagagggatagggtggaattttatacaggcaagtcagggaaggcctccctgataaggtgaggtttaagcagatacttgaatgaagggagagagcgagccatgtggatatcttgggaatgagtaatccaggtagaaggaacagtaactgcaaaagccctgaggcatgggagatataaaccagggaagcagggttgatggcacccgcctgtattcgcagctacttgggaggtggggacaagaggattgtttgaacccaggagtttgattccagcctgggcaacatagtgagacccccatctcttaaaaaaattaaaccaacaaacagaccaggggctttggaatcaaaaggctgtatgttagctctatgtcctggagcaaatatttaacttctctgcactgtttcctcatccctatccagaatgataatgacacaaagttattttttctggtttcttaagaagattcaatacatgttattcctgacacatggcaggcacttggtatgctggtgcccttctcttctcccagactctccattcatcctcaaagcctccacataatgctgactgtggtatcttgcatatagcagatgctcacatatttgcttgtaagaattgcaaaagagcacttagctaaaaatgcttctcttttataacaggtatgcatcctttgccacctccattaacaatggtattcacaaagccatttcaaccatatatcactgttggcttcaagaggcattgacaatgggaagagaagagtgggcaggattctctgaatgtgaattctgcaattcctctgtgattttaggagatggccattgcatgctcattaacagtaacatcctgctaaaaagcagcttagtagttttgggggtgattccagaggaataaaggaattccatgcagcctccctggtgattaaggagggcacgagctatactggggtagccagaggaatgtctacaactgtttctctgtctttggccaactcttcctcacgtattaaaagaagccttctctgactttatctcttatagctttttctttttcttttgaataagcaatacatatgattcaaaactcaaaacaacataaagtatacattgaggaatctttgtcccattcctgtccttgtctttctttttattccctgaaggtaaatgcttttattacttccttgttccttctagagtttctttatacagatgtaaacaaaactgaatatgcattattattttactccctttcttaaaatgaatgtgtactctatgtatttttggttgtgtgtgtgtctgtgtattttacagtgctctttttgcttaacagaatgtcaagagtattgttccaggtcagtgcatagagagctttctcagtcctcattacaggggcatggtatccatcggaagacgtaccatagttaatttaactatttccttctaacagagattggtaaaccaagccttgaaaagatgatccctgccagccctgtacttactgtactatttcataaaaacatttgggcctctcactaaagctgatagggttcttgaaagtagaggctgtggttttatttatatttatatccatagcacctcagcaaaacctggagatacaagacaaagcaaaaacaagcatgatcccttccttcgtggcaggacttacaacatgcagggagaaatcattgtttttggaactcacatcaataaatacagaactatagttgttgataagttatataaaggaaagtacaggggattgtaagagcatagactagggtgatgtctttggatctggtgtgagagatgtcaagaaagactccttcatgaagttgatatttgaactaaggacatgatgataaggggcagataacaagaggtagagaaggaggagaggaagatgtcatagacagaaggaatagcatacgcaaaggccctgaggttgaagggaacactgtgtatttagggaaaggggaggaaaccaacttggctgagcagagagcatgacacatggtaacactgtagaaggagacaggcaaaagcatttagggcatttgatcttcctctgagagcaatgtgaggccatgtaaggcttttaagcaggggagtgacatggtctgattgatattttaaaacagtcactctagccaccagggaaaaaacaggctgcagggtgggaagagtccagaacttggagtagggtgttaatgatagtgatgaagaggagtcgacacactttggagatgttacaaagcaaacgtgacaggtctgtcgatgaactgaccatctgaggtgtgatgaacaacttctaggatgctggtgtctagagaaataggatgaataatggctccttcactgatctcagaattcccagaagcctagatttggaggaaaagatcctgagttcaacttttgacatgttgaagttgaggtcccttttcttttgagaaaatcaggaggaatctgtaggaagtaagatatacatcctggagcttagaggagggttctgagcagagatgtgggagcctttgtgtgtaggagataaatgaagcgttaggggtggaggagattccctagggagaagaaagagaatgcgacctgaagagggcctaaggtaagccttgggcctctcctatggtcagtggacaggtagaagagaaggaggaggcgcagcaacatgcataggaaaaaggcagccaggatcaaagggtgaagaccaggagggtggtgccatggaagccaatggaaagagatagcacaaggtgaacagtaggtgccaattggttgatgatcttatgtgcaaggccattcatctttcctcccactagtcccactttccatgtattggttcattgggatctgaaggctcttcctctacagggaggcaggtgtgtagaagccttctttttatctgtcatttttagtgtccttctgagctaaagggttgtggtgaactctgttttcctttcacagatgactacagtcatctttaggtgacacattagtgtgggtgacctatacttagaaatgtggtacatttcaaaatgtataaagggttagatagctccttctctgtgctaaaaccaggtagtctacactaattaggtaagaaaataaccacattcagccaaagacattggggagccatagttacaaaatatattccatcatttttatctgtgtttccatatgatcactacccttcaattacattttttatttttagacctaaaaatagatcagaaagttttgcttatcttattacattttctagaaagactttatcagatctagtctttttaactttttgtagatttattccatttaaaattaattatttcctcttcaggattctgaagagaacatcaactttttttttcaacctgtattttcacagaagtagaatccaaaggtacctgcttaggatagcttttccctttagcagaaataaacagactagctgagcagcagaaaaatcactcattatgttccgaaaaatcacaaataattgtctgatagattgctttatatacaatgacctgccttcctccttgcctaagcctgaaagtctgtctttaaattaggttaggaaggagttattattatttaagatgagaaagggcctaggaaagaggaatgacaatggatgggaagtcatcaaatggatgtgaatttgcagtgtgatagacagggggaaaatggagggagaaaagagagagaaatggcttggtgtttcattcactcacagaatcagttatgtctttgtccataactaacatctcagagaatcacactcctcttaaaatgccagttcttttcctggtatgtcaagagacatcggcatttaaattcaggaatcctattatatgatcttactactcaggtactcacaagtagaatttcatctttaaaatagtcaaaagaattttagccatatttagtcttccacgaaagccataaaatgaacaatgccagtaacaattatgaaactaaattggccttataagaataaaaaaatcaattttgcaagtttatattcacagtgactaatttccatataaataatctgactttttccagtctaaaaaatgtgcctgtattctcttgtttttttatatttacaatccttgagatgtacttaggtggaaatatttgaaggcacgttgatatgtgttgcagtattctaattctaattatttctctctctctctctctcttttttggcagtatatcagttacagcaagaggcacctcgtcccaagagaatcatttgtcctcgggaggtcagtgctcagctatttccaatacaccttgttaaatatgatgaattgtcagcactatgtagagagtggagggatttcaggtttcctgggagttgatttctattaacatttgttggagtgtcaaaaaatttaacatcttcataatctatattttgacatcagacattatttaaaaaatactaacaaaccaacttggactcagatgtctcatatttttaaccattgccgagacaaattaaacaacctttgtaaacaccaaaaaatgtgtattctggatgttttctttgttaatatccttttgattcttttagcattttttattatgaaatgcttacagtagagaaagtacagggaataataaacttctgggtactttcaacgcccatatttagtaaatctttatgctttgtcatatttatatgacattttaaaataataaagccttacaaaaaagtgatgaggttttaattctaactttccttagttcactaatcagttctctgattgtgtgggatgccagcaagatttgaaaggcaggactaaggctctattttctttttattctgatcagtttctttaatagcatacttaatatccttcaaatcaaaggcccatgggtccttgcttacttttgctattaatgggattaaatatagagccacggatagcttttaaagtgccatgcatgccttatcaagggggaaaggctccaattccaacactcttgagattcactcttgaacattagtactttttggatctggttttgaacctgtttcaaagacttaggtacctgcatacccatactcagagccaagttatcatggtttaatacatttttctacataaaattttacatctgttgaagggcaatgaaatttatcaagtcatctcaattttagtacacagtagactttctcatcctaggcatgtggctggagaggaggaaatatctggtgcttaaggaaaaatccaggatgagttccatttatttggtactctgatcttgtcctgtcactaactctgcggtcaatatattcaaataatatattcaataatatgttatttgttattcaataatcaaatccaatgatattcaatattttttcaaatgagagaaaataggtaaatataaatttttgaatgagatgcactaaataagggtgttctcagtgtgaattaagacacaagttgctaaaatttccttcactcctgctttttactgagtgtttctccatcagaaaaattattgccatgtgtaaggaggtagaggagtttaaatgtctcaatgaaaaaaaactttgtaaaattagaatacaactaaagactctatctaggggcattaataaaaagacactgggcaagatcaggcaccagaacttgaaatgcaaacagatagtaaatagtcattcatttatctgtttattctgtaaatatatatggagagcctactgtatttcagctctggccttgttgtggggaatatagcaaagaacttggctattggcattttgaatatcataataaaagacaacaaaagtatgatgtaattaaatatatatttaagattttgtccctgtatatgtatgtgcgtgtgaaagagacagaaaaagagagagatagagagaaaaaacctctcggtttctcaaaatccttggaaccatgtcagttgcccttaaggcaggtggagtgttagcagtggaggtaggcgattcggattatcctcttacaaactcttcctagagttccactgaaactcttcaaccatccagcgggctgagggtccactgcatgtctgtttgctgttgcagtgccatcaccatctgctgtgactaaagaatatggtgcccatgtctcttgtttcccccttgtctgactgttaaaccatgctcttcaccttttgaccttaccaatttgatatattagtaagtgacattggttgatgcttgctttcctctagaattccatatcccatttctgccacgaaacctaacgtgaaatggagattcatcagctccctttcctcagcaggcagcatggggcccatctagccaggcaggtgtcagatagtaacaggtcaagtttgctggaagaacaggtgctgctcagatgagtgtctgcaggagtagcttcagttccctttgttctctagttggtcctccagtgtgatgttaactgcagatagttcctgcctaaattcccaagcctcccaggagttggcctcctgcaagtgaaggcgccactttctcttgcatgatggtgaaacagttttcccctactacagacggtgcttagtcatacgtcttgttgtcttgtaacacacttgcatgcttgggagacatgcctaatgaagacagaaagcctttctgtgtgagtttgtggccagggagattgaagctttatttacatatttacataaagcagtaaaggctgtttattttaaacaatgagttataattttttctacgtacgttttcctattacatctcatccgttagctaagagcccgcatcttcctcttctacgcagctctgggccctttttcttggtcttcaatctatctcttcccagctactcttccctggtccctagcgtggtagctccagtatactcaatctctgttgtttctctgatgactcatactttcccgggccatgggcctctcccagattaggacctgccagttcaacgtgataaatacccacattagagcaccaagcaaagtgtgcaattagagagatgtggaacagtgtccctctaaggtatagacgtaggccagtctgccttgatacatggtggttatcaacagataccaactacttagtagactttgctgcagagctgggtgagtcaagggtacagactgattcagcaggcaaaacccacatacttagcaaatccaggaaagcagggagctcagctgcaaagtcagcttggacttgttttgacttcttgctccaccactttctagctacctaacacagagccaaccacttactctctcagggagattaaggcctaacctacagataagcatctactttgcagggttgctataaatggcatatgtgggtcaagtgtccaatacagtgcctgctgcataatgggtactcagttaatgttcatgattcatggcagagtcagaaacctgtgaagaacaggctctgaactggtcattaaggacagagtcgaagtgatgacagtattctctgaatgtaagggtaagaggcagtgatcaagaagaaagcaagatgcccaggtccggaattaagcaaccaggaaaaaagatactgaggatgaggaacagaaggtacaagcagctgaacaacagctctggcgccaattaagccaggcaggatcaggtcgtgaaataacagttcattgctttcttgaagctttactactgcaaattaatatttattgggcagccgcagcacctgatgctctgctggcacttcctgaacactccatgccgacagatgcaaaacatcttcccatatgcagaattctcactgctttttccatcaactatcagtcagtcacatcataagcatttattagttaccaaatgtgtgcctgggttgtctgtcacaaactgtgtggaatgttgactctcaaatttgtttctctagccaagacctctacccggggctccagacacctctatccacctgtccactggacctcctcaggccaccacctgtctcacaggccaccaccagcctcatgttcagaatagaactaggccccgctccattggatgacacctaacttcagaaacctgtacttctcccttccctaccctcacccctttctcctccattcttagcatcaagtctatctccaaatatatctcgcattgtccactgtactctatccccatgaatgttgtgtggtttgggccattgtcatttcttgcctggatttcattgcaggtaaagagcctcccacctgatctccctgcttccactccttgcagcttccctgcagctcacatatacacacacacatacacactccagtcaccagacaggagcccaaatcatcatcgttaaatataaattagacccttcaatagctttctgttactcttagtaacaaatttcttgccgtgcctatgagccatagtttgcctcctgtgtctgtcactgccctgtctgtaccattcttctccaagtgcactgccttttagccccactagattctattcccattcattaaaaaaaaagaaagaaagaaaaagaaaaaagcactgtcactatcactgggcctttgcacttgccctttgcctgaaattctcagacccaggttctctgcacgtctaggtttcaggtcaaatttcacgtaataagaggcccttcctaaactccataaaaaagtagcacctccccaacccttggagcgtctctgtcatattgccttgtttattgtatctgtggcactttatatactctctgatacactttcttaacatatttgattgttgcttgtatatgcctctccaggagaatacaacctccagagacttcatcagtcttaatcatagatatatccttagcagtgagcatagccaagcaacagtggggaatcagtaaataaatcagtaagtttcaaaatgatgaaaaaaaaggatagcgattgctagcataaggaatttgggattctcaaactattactaatagcatatcagatttactcaatgctgttattaggatagtgagctagacttttggcagttgttaaggtactaacttaaacacagactaaaattttttcctggactaatccaagtttcttcttggcctctccaaaaggccaaaatggcaagatttacttgtgtgactcattgaaagtcaagttgccctaaaattacctcaagcctacactaaataagcagaagttcttttgtgactgtaaatgatttggtgtcatttgtcttttttgaaatcgctatagtgaatatgggattataaaaagcaatttcaaaaaagggaaatacaatggcatactattatttcaagttgttctccattttatatagcttcatttccttcttgctgtggaatagtctattttggaaaacttttttaatgcaaaaatggatggtagagatttctagcattcatgatcagaatcagcttttttcttgatggtcagaagttagaccaagtactgatggcagtggccaatcttttttttttttctgaggtggagtcttgctttgtcgcccccgagctggagtgcagtggcgctatcttgactcaccgcaatctctgcttcccaaattcaagcgattctcctgcctcagcctcctgagtggcagggattacaggtgtaccccactgcacctggctcattttttttttaagtagacacaggcttttaccatattggccaggctggtcttgaattcccaacctcaggtgatctgcctgcctcagccttccaaagtgctgggattatgggcatcagccaccacgcccggccggcagtggccaatcttaagttggagtagtatctcactaccttattttaccttccagtgaattgtattcattttttaaacactgcttaagtattcctaccctcttttatgcagttttccctagtttttggtgttctaaatatctactgattttactcttttctatctttatttctaaaaactgttcctgtaaaccttcgaaagcattccatttcttcattatgctttttaaaattgtattaatcatatctagacttcacaatcttgtagctcgaggacatttatcttgtcttaggcacgtctggaagatcttaacaggccatattgattgaccatatcattttcaactaactcagtacattttgaatcacagattttaaatgaactctaagggattttctaccattccacagttctcccccttttcttcttttatttattgaaataaatgttttaaaacaaagtgcatttgggggaacgtgaaaactctactgatttaagacatctcgacaaggtatgtcttaaagtaatgagattgattctacaagccacaaacaaaaatcaatctcattaccttttaattggctttatgtgtagtaatcagaaggctatttcttcccttgcagaaaaactattccttttcttttcatcctagactttctctgcttgtctctttttttcccccttaatgccgacacaatcaagaatgaaggactttcccatcattattcctccacgctgtcatctcactcactgatgctgtcaggcctttttcttgatgcagttttcttctgaactggacttgctttgggtttagacctgatgtagtacaggggaaaaatctagtaacaccaatgttagaaataaaattttgacatatgaatttttttccctaaagatagaaccaaatgttttctgctttttttttaaaaacaaaaaactttcttttttattgacaagtactgtgatctaccaaagtgcatactccccctgcctccaaattcactctctttggaatactttgaacttcttctaaaataatacagatccccgcaagtatgcacctagaacatatttagacatttccaaggtgaggtcataagcgcttgggtaagggctgttgagaccaagctgttatggagttcagagccaaggggagcaggtgaggtgagctggagagggccaccagagaacagtacatatgccaagacataagatgaggcaaaagtagaatgaggaaagtaaatgggaaattaaacagtgattgataataggcaaagtttccggagaagattcttcaatctctctgggtgatttttatttctttatttccttccttccttccttccttccttccttccttccttccttccttcctgcctccctccctccctttctccctttctccctttctctctttcttttttttttttgacggagtttcgctctcgttggcccaggctggagtgcaatggcgcgatcttggctcaccgcaacctccgcctcccaggttcaagcgattcttctgcctcagcctccctagtagctgggattacaggcatgtgccaccacacccagctaaattttttgtatttttagtagagatggggtttctccatattggtcaggcgggtcttgaactcctgacctcaggtgatccacccgcctcagcctcccaaaatgctgggattacaagcatgagccaccgtgctcggcccttttttttttttttttttttttttttttgacggagtcttgctctgtggcccaggctggagtgcaatggcatgatcttggctcactgcaacctccacctcctgggttcaagccattctcctgcctcagcctcccgagtagctgggattacaggtgcccaccacgcccagctaatttttgtatttttagtagagacagggtttcaccatgttggctggactgatcttgaactcctgacctcaagtgatccacccgcctcggcctcccaaagtgctgggattacgggcgtgagccaccgcacctggctgatttttatttcttaacatctcacttgaaaaggtatattcccttaattagtagagttggaatactatgtggtattgttcattgttttagaaaaaaagaactgatagcatcgtgtgttacaacatgtgttctgccatcctcctctagcctatgacagctggaacccaagatcccattactcattgatctcaggtggtggtggtagtgagagtgtggatccaaactgagacacaattgttatgcggaggtactggcttttgtaacaccaaccttactcatccaaacacagagcaaatgtcacacctccataggagttgctacctacagcagccccatattaagtctgctctgtgactcagaggtcaggccccacaagttttggggtgtaaccagggttatccaggaaaaggagcaggtgcataatgctggagctatagtgaggatttaaagacatgcttcacattttgctcacctggttaaactgtaactgagaaataatgctgataaaggcaggttatactttgctccagataagccatgtctcctactggcgtgtggcctgtccaaccaagcactgagaggcttggacgtagatttctgaccttgattctgctttccattggaaaaaatgtggatgatgcaatctcagacagcctcaattttaatatgactatgctgaatgatattacctaattatttacttgttgtcagtcttttaatagaaatgacagctatcacatatggagtacttcctgtgccctgagcaccggcttcagagttttatggatgctacgcccaccacaatcccatggggcttgttatccctctcactttacacaggaggaaatgagacaggaagcacaagaggggcaaaggccagattccaacccagatagttcatatcaatggctgggcttctaatccagtgagtcacggagtgtgatcccagcatcagctgggaacaggtgagaaatgcaggttctgtggcccatcccacacctgaattacaaaccctggagatggggcccagcaatctgtgttttagcgagctcttcaggggattctgatgccgccttgggtgtgagaactactgttctaaggactgttcttgcttctctctgctttctatttcatccttcctccctaatcccttaggatagaagactcaagatgcttttgcctcctggtaatgcttgctatttgctcagcacttgtgctagactattcacggatttcagtgtaggcacccatagccttccttatttttcccagatgtacttcctcccagatgttattttccaccctttaaaaatattttgtctttcttctttgctatttctaactttcctgtactcttttatgttgcagagaccaaatgtgaatcctgcttgtaagggtggggtcagtacttgattaagcctgatctcctccctctaccctccattttctggtattatacttctaatgttatgtttgtgttactaattaacaaagctatttcaaattcaggtttttttgtttgcttgtttgttttattttgtttgtttatttgagacagagtctcactctgttgcccaggctggagtgtagtagcatgatctcggctcactgcaacttccgcctcccagtttcaagccccctgcctcagcctccctagtagctgggattacaggcatctgccaccatgcctggctaatttttgtatttttagtagagacggggtttcaccatgttggccaggctggtctcaaactccttacatcaggtgatccatctgcctcagcctcccagaatgctgggatcacaggcgtgagcgaccacgccccgcctcaaattcagtcttaatatgatgattcatgttcattcatattcagcatatactattatgaattccagctcttttgggatcttttaggtgttttccttatctgtggctatgcatgaatccttgctagatttccttctggttttaatgtcctcttgccttaatgaaaatactaaattcattatcgtatgtcagaaatgctttaattgcatttgttttccaagatgctagtttcttcactcagtccatcctctgtgtgcttaatgagcatttctcaattcaggattttagataacgaatttgctaataaaagccagtccagagcaggtggtttgggcaaggcccacctccttgcctcagtctaccactcgcctggcatctggctgatgctgactgagccattggtaataatcttctttggctatgtcctttagcaaatcacagtctcacttgacattagttctaagtacaccatgtctctgtcttgttggacggaaaagcaagctctgcttcaacgatagtatctttttctttctccttatttacatggccagtgtcatttcctcatcttctgtggaaagaaattaaatagccttggcacagcccaacaaaggcatatttggttgccatccagcaccttgcgtccttctaggtaattacacatcgattgtttgatgaatgttcttggatctccctgggtatttctaccaagtctgtaattacactactctggttgtccttttgctctgtcatggttctcagggttccatggcttctcaaagaccaggcttaatgatgtttcatcaacacctttcaagtcaaggatgcagctcagactccttagtgtttcattagtctcagttgcttaaaaatgtaattcagccattttctacctcagttcattgtgatttcttaagttggcatcagtatgccgtagcttaaaaattaatgattctctcctcccagtgcattaaaagatgaaagagcatgaacaaggaatgatttgacccaccattaaataaaaaggcctttgaggcattggcaagctctgtgttttgagctaagaataagaggtcctgaaactggtttttggagaatggactctcatgctttttcgtctagcataggcgttggtcagctatatcctggagactgttttggtaaataaagttttattagaacgcagcagtactcattctgttatatattatctgtggctgctttcatgctaccatggcagagctgagtacttgagacagaaactatatgatcccaaacctaagatatttactttatagcccttgctagaaaaaagtttgccgacccctggtcttacactaaaagtaactttaaagagtgagttaggccacgcgcggtggctcatgcctgtaatcccagcactttgggaggccgaggcaggcagatcacgaggttaggagatcgagaccattctggccaacatggggaaaccccatctttattgaaaatatgaaaaattagctgggtgtggtggcacatgcctgtagtaccagctactcaggaggctgaggcaggagaatcgcttgaacccaggaggcggaggttgcagtgagccgagatcgcaccactgcactccagcctggagacagagcgagactccgtctcgaaagaaagaaaaagaaaaagagtgggttaatatacataaagcacttagaacagtgcctgacatttatttatcagaagcattggtctttaatttctaccatctcccaagtactacataaatgttagtggaaaaaaaaggagtttcagccttggaatttaggatgaatttgatcccaagccatgttgagagatgacttggccttcatgtttaacatgcataaattaatgaaagaggccaaagcagttacaagacgcaggtgttctttgaccttctttctgatggtcactttctccacttcaagagatggaagcctgttagcaaaggtggcacagcactccatcagcaggaagttaaaggggtgcgtgggatctgtttatttggtagcaacatctgaacatggaagctaaactgacttaaatttcaggaacaaagctggtgttagcctcctatatgttcttgaattctgattaataatttgtatgccaatgcctttgaggaaagagtgctacatctgcagttaactctgaagtctattttttaaaagttggattgatggatggatagaggaatgaaaaaatatatatgctgtaaagcaagaatagtaaaaatgctgtagaacctagatgatgtgtatatgggtgtttactgtaaaagtctttcaacttttctgtatgtatgaaaattttcattataaaacgtcaagaagaaaaaatgaagactgtgtgagaagagtggcaggatgtgctctggcccatggaacaaagacattctcttgggtgcacagccctgacaggtgggaggatgacttggcatgagagctgtcgaaaacactataagccatgctcaagaatttttaatgtggaatagagaacttttctgaaaaagcatagttgaaagcaaggacaagcattaataaggcacttctactcttttatttattaccatgttgggaattattttgggaggagtgcttgcttcagaaatgctaaagtaggtaatttgtaaaaaaaaaattaatagagaacaggcttctggattttatgtaatcattacaatatagagcaatgagtgctggccctgatatcaggaattgggttttaactctgaatctgctgctatccctgggcaggactgtgggcaaattagttaatcactctgaactgcagcttccttgtctataagaagaaggcaaagatacaattccaccctcctggtgggagaatatatgtaaaagcattctgaaggtcatgacgttatcagtgaacaatgagttctcaaagggggcaatatcacccctaaagtggagaaatttggttcttaccaaaaaaaaaacccttactatttatatgtataaagcacaaatacctatatagaacataaacagatatacagtctatatgtaatattaaaattcctttgtggggaggtgcttgagagaaaacctgtctaaaaaggctccttagggagctataatgcaaaaacagacaagccttgaatttctaccatctcccagattctgttctcctttctttttctttaggtagattaattttatccatcactttgaatacttaatactcttacatttctaggagagagagaaaaaagtaacttctgggagaaaactaagaatgatagacactttgccttttccaaagtacgtatagtaccacttaacccaaataccattaagctttgatggaaggaatttactaacaagagtgaggaattaaatgagtatactcacccaatcttttttcctctagaaatttaacagcagcatgagttttcccttgatttgattcagttctgttgggtacttcaagctctttgggcttaaaaggtatgtggagaatttaaagagagtttggaggagaataatgaagatgaattaaggattggaaattgggacctattagaaaaggtcaaaggcacaaggattatttagtttgaggaagaacaggcgatctagtggcacagagatggcttttaataatggaagccttattctgtagagaatattctcagattctcatttgcactgaagaccaaaagaaaggaagatgcataattggaagctggaggaacataagattagatgtgaagataacatttatcttcatgattaaattctggattttgagtctcctttacagtatttcttattttaaagtaaaatccctgtttggtcgatcagaagtgtggacaagtcagcccatcatgtttgattctctggccctggttgggaggtcagccagccagcccagccaacatggcctcctggggatctggcttgatgggagaaaacattcatttcacctggacctgtggctccaggatgccaaagatgagtacaaaaaactctagccaacagagtgccaggctcgtgccagaaaagtatgcctaattgggttgtccaaacaaggagggcctaaggcagattttgagagccaacatatggagccaaggaatcacggtgccaaagaagatgtagcaaagaagagtgggtgaaagtgagctgctgggaagaagggctggatagaggagtgccactcatggctgggcttttgggtgttcctggaagcccactgtgagaatggatcaaaatcaatgggaaggtgctgccaaggtgtcctaagcttctaggataatatttattctctcagggttttggaactgctgcccaaagtcatagttctcagtcctgggtgtgagtcagaatcacctgtggagcctggcaaaccttacagacaccctggctccagccctggagattttgatttaatggaaatatcacttagaattctattgtaagcaataaaagtctattctcactaaactaagcaaaaaaaaaaaaaaaaaaaaaaaaaaagcagggcctaggagggcggaccaattgtggttagaaggatatgaggaaattccctggatggaaagaaaagctggtcagagggcttgagaaaggatttgaagcaagactgacagaccttgggcaataagaggtgatggttagcgtcagagttccagggtagtccaacctgccctttgcaccttgcttctctgtgcctcagttagtcctctggaaatggatataactgatcttacctcttgggtaatcatgaggatcgacagggttgatatatgtaaagaaagtgcttagaacaatgcctggtacataagttctcaataactattaatgattattgttgttattaggctctgccatgcatgtgaatcaactcttaacagtttcatttaatggtttctactcaagtctcaaattccaggggcagagcatctgggtggcttatgttggttcacatgttcaccctctaaagaatgtgagggacttcgattagcagaatcactggctcgaagtcacagttgttgcctgtggtcttcagtcttcactctggagattcagaaagcagacaggggaacaagttttgtcccgtagcttggaagcataaagcatcaaggtgtgagctaccaccaatgccagtctttccatggataccccttttgaaatttcagtgagccccagaaagggatctgggagcataagcaaacctgcctttcacttattgtgttatgccatgaggctgagctctgtgaacaccgtgagcaatatgctgggacagcagaggtgaagaaacaggagcccttccctcaaggagctcacattgagagctcataaaagccaacaatcccaatcccagtaagatcgccacggccctaactcaggccttttataaagttcagaggcaggagacttccccaggatggcagcatttcagctcttacttttaaattaaatcagtgagattttgccaggctaaggcatagagagactgaagaacaaatattagaattccaggcagaggacataaccccaccaaataatatcctagaagtatgagcagccgagggtgtgcttcagaaactacagaagctatgtatgaggaacatgaagaactgaggggtgaggatgtcgtggggcaagagcatgtgtgtcagtaagaacatattctggacacacaagcaaggaccatccagggaagatcctagatgctattcatgtgttcatccagtaaatacgtattgagcccttgggaagggccaggactgttttagactctagagatatagcagtaagcaaagcacagtaatctttgcccttatatagtttccatttgaatggaagatattggcaaaaaaatgtattcatcagagttcttcagagaaatagaaccaattgtatgtgtgtgtatgtgtgtgtgtgcgtatgtgtgtgttgcaggtggtgtagttggaaggcctgagagctctcgagctgatggtgttgattccagtctgggtctgaaggtctaagaaccaagaataccaagggcaggagaagatcggtgttcctgctctagcagtcaggaagagggagcatgaatacaaccttcctctgcctctttgttttattcaggccctcaatggacaggatagtactgacacacactggggagggccatcttctttactcagtcattgagtcaaaggctaatctcttggagaaacaccgtcccagacacaaccagaaataatgtttgtcagatatctgggaatcccgtggcccccacaagttgacacataaaattgatcatcataacacataagtaaaatatatagtatatcagatgatgataaatgtcatggggaaaaaatattccagaaaagaaggatggagtatgccaaggaggggagttaccacttttaaggagggtggtctgggaaggtccgactgagttgtgtatgtttgaccatgcagcagtggggaaacagtgaagaattctaagctgagagcaatgtgacaagacttgcattttctgacttaagtgtgaatgacagattggaaggtgataaaaggatatagggagaccagtaaagagactactttcgtagtctagatgagtagatagcccagtggacttggagagaaagggaccgttttaagagcaattaaggaattgcatacaatgaagaagacttcgtggcagattgcaagtggggttgggaagagggaggagtcagagattatgatttctagcttgggcattgagtgggtgatacgctggatggtagcattcacaggggtgaagagcaaaggaggctgagccattaggtgtgatgagtgtgatgagtactaatcagtctacccaggtctccagaatggccatgttttagggttttaacaattttcatatcaacccatctgtaacagcagagtcagtgttctctataagtacattatatctgttatccttgagcaatttcccttccttttggtgtaggaaaagattatgggctttggagtcaattagaccttggtttggatctcatctccctgcctctgcatgatcttcaagtaatgttaaccatacaggccttctttttcccgactgcaaaatgggaatgacagtctccatgtgacttgcttgttgggagacctgaaatacccacactgaaggcacttgttaaatgttggctcctcctctgctcctcctggccctccccttagtggagttctgggtcaaggtcaataggactgaactgggtgaagatcagaaccagtagcaaaagggctcaatgcacgagtcatgggtatttgtatgagtgtgtctgggtgtagttgcccttgcattacttttaaaatataaatataaataattttgtcaatttgccttcctctgttatgatattaatacttattgtgtgtagtgcttatgtaatgaaccctgagaaaacatgacttctctgagccccgtactggacagccattagacagtgctttagccactccttcctgagaaatcttctgtgacctgggaaagctgtgagtggtggaagttttgtttccaacccagcaatcagggcaaaatttcaaagctacatgctgtgaggtgtggagtcccatagcagtaaggaattcaaacattaattcacatgtatgcatagcatggctgatcactcccaagaaataaatttcttctttagtgttttttgtagtttaacctcgtttaaaatttttccagggagggaggaggttcccttattaatcttactgacattttagtctgttccattttgtattcatctgatatatttccttaagtagttggaggtctctcaccagtactgttttttcttaaaagctacctttataaattatcagcattatcaaaagcaaatatttccttctgccttccttttactccattttacttaatgtatttaaagtttttgttgcttatttgcatttttggttaaaaaaaatgtttctaatattcttccttgggaatacttaacaattcaaagttcttccagtctaaagcagggtttattgaccttggcactattgaccttttagggggataattgtttgttgtagggggttgtcacatgtactgtgtgatgtttattaacatcctggattctacccactagaggccaggaataccctcccccgagtcctgacagtcaaaactgtcatgaggcaaaaaataagccaaagaagagggacctggtatgctaaggacaggaggtcccacttttaagtagggggatctgggaaggtcccgctgagttgtgtaggtttgaccacgtggcactggggaaccagtggggaattttgagcagagaacaatgtgacgagatttcctcagactttgacaaatgtcccttgaggagcagaatcacctcccctcccagttgagaaccactggcctaaagaaaatattttatgtttgtttgctctaatattatcactgataatcataatttctggaaaattttgggggcagaagtgaagccagaaaataaaccaaatgattgggaactgcttttgtctcgagcacccctaagctgatctacttgtttgcatctgtaagttcacagaatgttttgatcaggttgctaaagtatccaacttgtgtgtatgtacagaacttagcaaagcaattggtcaccttttaaggagatttattacagaaagactgaccagtggacatttatagtacattctaatcaatacaggaaggaattcacctcatcagtgccctattcgatttccagaagtgttaaagaaatgccatgaggaaaaaattaggccttagattctaaatggaaagaaatgggagattttagagtctgctcaattttcattctatgctctgcactttgactacaagagtgtaaatttcagtacttgcattttctttctctccttttcagtgggggaatctttgatttctaattaaaaaggaattatctgtatttattttttgtggatgaaattgccccagtatcaccagcacaaatccccccatcaaaagccttttctcccctacttgatccatctctcagaaaatccggcaatctagctgccctgtgtaggaggctgctaagtcgggtttttaaattatttctattaagtaaaaacttaacatataccagctgcggagggattacaaaagctttgttctttcaataattggaaaccttgtttacagaggactcacaatattctgtaaatgtctttgtgttgaacataaaggaacttgtgtttatctaggcaatgataatctgactataaagcaaactcatttaaggattatgctttctgtctctcactgtgcagctgtcaccctactgttctttggagcttggcaaaatactgagaagtcttccttaaaattgaaaaatacattgggaaataaaccaggtagtttgggaatacacgtgaatccaaatcacagggaaatatttgagagaccccaaatgtcactccatcctaggcaaatttttccgaagttcacatttgccaattcattgatggaattcagttcattcaagagagattttaaggtctcgagtcctagcaaagaaaactgaagaccattcagataatctaatgtatttagtcaaactgtaaattttgagagccaacaaaggcattagcgctgattagtatctactggagaaggagtgaagcacagtacttaggggtggtccccatctaggctcagccacttaactagctctgtgacctcatgctatttagtggttctctttaaaataacagcactcacttaccttggagcattgtttagagacttaaatgagacaaaaggagagaaaccctcaggactctgcctggcacagagtagccactcaataaatgagaacctattgccacgatggtccaagtctcacatgtgggtatctcatctaatctgtgaaacagccttattaaaatagctcatttttataaccccagttttactgaaaattgagaaaaatgagatgcaaaggagtgtaataatctactcagagtcccacagtaactggattgatgagcaagggtccacatgcatattctgtgtctcattctgcaaacatgcaatgaggacaggcactcttgttttccgaatactcactatttgaatatttgctattgggacttgctaaaagccattcccaattagaaaccagctatgacacgttctctcatgtgtggcagcttctcaaactttaatgtatctatgaatccccttagaattgcagatcccacatttctagcaaattccaagatgatgccaatactgctggccccgtgatcacactctgagtagcagggtgctgaaagacaaagggtgggcttctctcatatctgtgttctcctgatcctgtttaaacatatagcacattatatctgtaatttccctaccttttccctgagggtttagcccttcagtatttgtttaggccaggaccctaggagcactaccaactcaggtccaattagatagtaactttcgaatctttggtaatatcactgcattatttatttttattataatacatgctcagtgtagaaggctaatgaaattcctatttattcagctgtagactgcacacaaatatacctactcattactgcattaagtgttaaacaattaggtaattgttttttaagtgttttatattgtgaaaagattgctattagattgtcaggtaattatttaggagcattttagtaatatttggaaaatggatatttttgcattctctaaaaatgaattttgttttctgtgtaaagtaatggaatatagactcttgctgtttgaagctttgctgcgctatacattttttaggaatgggtgagactcagataacaaggggtagctgcatttactctgtgacagatattggcagaaatcctggaaataggtgaatgatgaagacaaaattgctgctccacagaacagttaggaaaaaaatggcaaataaatatttaaaatatggtgagataagttttctaatggagacatgtaaaaggagctctaagaacacagcaagggatgggcctaacccttccttctatacagaggagaccttctcaggatcccggtgatagctcatagcaactgactggctgtctgcgccaggcactgttgcaagcatattacacatatttattcatttactcttacaacaaccccatgagacaggtacttttattatcattctcattttaaagataagaaaactgaggagtatagaaataggtaacttgcttaaattcccacagatctggcctcaaacctaggcagtttgagtccagagcctgccgtcttaacccacatgtgatctggctcatttgaaagataattcaggatcttaaaataagaccacgtaaaaatgatagacatattagagggcacacacttatggcctcatctggtttgatgagtgcagaggatgaacataggatgatgagaccattgggctgaaaacataacattcgcatggcctcatatatataggagcacggtgtgtggactgtggatagtagggacaggactgagcccatctccagtagtcacagtgctaacaatttaattatacttgagatgtaactataaagtcataacatggatgttattttaacacatctgttacatgggcctggtcccttcccttcagtcaccttgggaagctctgctttcatttctgccaagttcccattgctcagagcgtgttgggaacgtctcttctaaaattcccattgctcagagcatgttgggaacgtctcttctaaaattcccatagctcagagagtgttgggaatgtctcttctaatattcccgttgctcagagcgtgctgggaacgtctcttctaaaattccttcagagcaagtcacaatgaaaatcttattctcttatgatcatgcctcgtttttgtctcgaatgtttttcctagtttggtcactcaccccgtttacttactggtcttggctccaaataacttatgccggtttgctgaaataacatgcactctcaaatccattctcaaaaaagtaaatgtatgtatatttctacatacagtgattctgactttagtatatgctttaaaatcatctagggggcttgattaaattacacgtcatacctctaccctcagtaattttggttcagctggttcgagatggggatgctgtctgcagtcttcaacaagcatcttgaagtttctgttttgaatgaccagtccacactggtcattttgagaagtgtacctttaaggatattcacaagaaagggtggtatatattaaggtagttccaaaacagaaattccaaaaatgttctggtcaacagggatataagtggcatgtattgtgcctccttggggtgactattctcttgtagatgatgcttatttagaataaaatgttcagttttatttttaaaaagaatcagccggccaggcacggtggctcatgcctgtaatcctagcactttgggaggctgagttgggcagattgcctgagctcaggagttcgagaccagcctgggcaacatggtgaaacccccgtctctactaaaatacaaaaattagccaggcacggtggtatgcgcctgtaatcccagctactcaggaggctgagacaggagaatcatttgaatccgggaggtggaggttgtagtgagctgagattgccccactgcactccagcctgggcaacagagcgagacactgtctcaaaaaaaaaaaaaaaaagaatcagccaccattctgcatggtcacaccatatacagtgaaaccctctgtgccttgggaaggacccatttcatgtgttttctcactcaatgacctcctacttggtgctctccctctgtaaagagaggtgttcctttttgagccagctggatcatctaaggacccagtattagaagaactagtaatccgtgtaacacgactacatattttctttctcttaaaaagaatgagctgctttcacttcttggagtcagagcactaaatcccaagagcagacatggccgatccgacagccgtcagtcctactcacaaaggccaggttcaccaggtgatggattgaccagctgcagctgctgtcctaggatagtcacagtggcagggaagctccagaaccagtcttcattcttgtcatgatatattgcattttccattcctttctgaatccatgtgactgcctaaatttttttattaagttgcctgattttaacaaacatagttttcaatgagaatgcaagaagaatttctgagttgccttactttttatttatcaactatcctgtcgccttcacacctactgaagagaatctcatacaattggaaacagaaattgagttacagtttctttaattaaattcagtttcacaggtgggtcctggtttccactgatggccaacacggagccttgcccagggagtgagtcaggcttctctaaggcactgctgggggcacagcacggaggttcttagtctcttggcagacctttgtccctgggagccctagcccccagccacctattctttctggatctgaggatccagtattatccaccttgaagaaatgtagacgttgtatgatttgtatagcaccatttaacttaaacattaagctctttactggtttaaagcttagtgaagtatagaaatagagactgtgtttagactcctgtgagtaaaaagtttacaaaaagaagaggattttgtttttttgatcccagcctctctctctctctttgacattaacaaggacacatatattttctttacgagcttcagagacaaaaaaggaaggagagattggattgctatcaaaatggccctcaaccagtagaagcagttatcagatggccaaccacatcctctatctttactctctcttacttctgtctttcctatcccctacatagggttgccagatttaggaaagaaagagagagtggggaagagagggagaaaaggagagagggagggaggtaggaagggaagggaagaggaagggaggggaggggaggggaggggaagggagggtagaagggaggaagggaggggagaagagaggaagggagagagggaaggagggaccaggatgcctagttaaatttaaatttcagatatacaaggaatcatgtattagtatatatctcatgcaatatttgggacgtattccatggccctcttccatgcctgtcccacacaattcagggctcttcttttattttctagtggttttcattttcagaagatttgtccctcaattggatcaaactctcttctgggcagaatcttatctggcatctttcaaggcaccctaaatatcagcttccctctttgggggtctatgttagatttctccttaagcgtttccctctgctgcaagtgcagaacacccctgagcgcctcatacctttcctctctgcacctgcaaggtcattacttcatgcacatggctggcctgagcctagagcccagaacataagggtgctgtgtatttttatcattggttgatgaactgaaagcaatttgttgtcttgttaagaatcaattaaattcagcatctattaactgtttacctgcatgccaagagttagtagtattaccatgtggctcatctgggaagttagattagtaactctttctcttttagggaaataagaagatacaggaagggaatagggttgagagctacacccagattttgcaaacttgtgctacggttcagccaaaaagatggaaatttaaaaatcgtcctcatatgtagagaatcacttcaaattttggaatatcgcctctcaaagaatggagattttgccattatatatcctcaactttcattggcttttctagttctaaatttcttctctggcatgttggttttacagtcacatgtctataatattataaaactaaaaaagaactttgaaagccgaaagactgatataaatgacaacatattcaattctcattaaaaagcttaccagcctgtagaataatggcacacatcatttatagaaaggatatcagataaccaggtgcctttttacacactttctgcttctattaatgatattatttaaatcttccttcacaaatgacaccgagcaggctttgaaccttgaagattaagttatggatgtcctgcttggttgagtaattctcaggtgtaaaatgcacaggagagtgaacacatatttagaagtgtctagatgataagttttgtaccagcgaggcttgtcctaggcagcattgtgagtgtggtccccaaagccccagctccgcctttctgagcctcttcccctagctcctagtgtcctgttacctattcagatctgcatcccttggaggatggagctaggccaggaaactgccccatatcatgaaatcctgctactgtgcctgtctctgagccctgctgtgaaaactgtccatttgactctaggaagaaatgactgtgaataaaacagctgccaagctcgtatcctacaacagtgaataaacataaacttgctgtcatacatagaaccattcataaaaacccataacttaatgtggctctacaatgttttgagtgtccctggagttaggagagaagaacaaaggccgagcatgagaaatcatgtcactttctcaccaactccaacatcataaacatgtgaaaacaaagctcttatgaaagcagatgatcatgtatgtgagaaaaatcagatgtgataacctcaaggctaaagctgtgattgaaagatcctttctggaatgtttgtgttttagtcaagtcataaatcttgtcccctgtagcctgcacctctggtgtcaaatgaatttcagcccattagccacatgttgaaaaaataagaatgttaaaatattgattttatttagaacatgatcaagttaagtctgctttattttttaatccaggtagacttcttgttttaattataaatacataataaaaacaattaggcacagagtaaaataaatgcttatgttttattcatgacagagtagttgttttatccttcaggatgaagccttataatatccttacaaattccttaatattaaaataagcatcgctttgtttttgttgaaaattctcttattggatgattgggtttgggtgggaaatgagcctaatgattgattctaggtcattcctacctgatactggaatgtgctgattataactccatagcttcatggatctctgatttggaggatacaatctgtaataaaattactaccaggaccctagttctgtttatttgaatagcatttttatctagctgatttgaattcaaatgcattattaatttttttttctttttaatataggtggaaaacagaccaaaatattatggaagagagtatgtattatactattctttgttttaataatttaataagtagtcatttcatgtgtcatttaaatattacaaattttctaatatatggtcatcatcatatgtctattgtgcaagagtttaatgataataaatgcaatcagactcctttgaattaatattttttatagtagtcaagtgcttggtttccattaatgtgggaggtagagcattttgcgctacttttccctccacaaaagagctactgagtgcctggcaagtacttgaaacggaaggcagcatttttcataatggaggctctctgttagtgtttcatttcactttctacctcaacacaatagaaacgtttggtgtgtccaagatggtacactgtatgtgagttcctgactttcgtgtacctcggtgcggtggtcaggataggcatcccacttctctgcagtctcataaaacccaaatgatgatatctcttggctcgggtgtagtagccaaattgccttaatactcccctttccatttttctcttaatttcaactcttgttttgtttcactttttccaaaacctactgcccagcaaatacgcatgaccataaaaataattcgcagtctaagcctatggtgtgtacagcacaacacagagggcaggcagaacgggccaggggagaggagatgcatcaatcacttttcttcccaagtccaacctggaggcgttgtgaggcaacgtctcttttgagtctaccttccaagctctcacagccaatctcaaaccttcctcttattcccttacccgtcagagcctcatcttcatgattaatgaccctcttaggggtcccagccccgtgcaccttcctaattgccacagctgcatttcagaaccttcctcgcagcaccctgggaatttgaccagcacctctggaatgcctgcctgggggcactggcctccgctcctctctaccccatgcccctactgtctaatctatgttgtagtatggctttttttcctcagtatgcttatttgttttttccttgaagatagcacaattaatttaaaaaaatagaagaaaatgaaaacctaccatatacacttttgcatgtgaattctaaaaggagctgtttattatgcattttctttttgcagaaaagttttgtcaaataactttttaattctcatcttcttacccccaattcatgtaaaacatatgagagtcttgagactaaagaagtgttttcttaactaccaaaaggaacatcttttattagatggtaattagcctaaaaccttcagattctgtgtttccctttatttttttaaaaaatgaagggtgtttttttcttccacttaaaaagtaatacatgcttcattcaggaaacgcacatacacatttattcctagaaggaatcacaagaaactattgacaatggatacctttagggagagaggaattttgcatttttagttcttttataccttcaacttttgaaattggaattttctgctgtgcacaggtattacttctgtttctaaaaataaattatggctgggcacagtggctcacgcctgtagtcccagcactttgggaggccagggaaggcagatcacttgtgctcaggagattaagaccagcctgagcaacatgggaagacctcatctctacaagaaatacaaatattacctaggcatggtggcacatgcctatggtcccagctactcaggaccacaggtgggaggtgggaggatcacttgagcccagaaggtcaactgaaccattgcactccagcctgggcaacagagtgagaccttgtacaaaaaaaaattaataaattaataccaattaacttggaaaattagaaaataaaggaaaatagaagagggaaaatacccatagttctaccatgaaagagaatcattgctaaccttttctcttcatctctttctggtctttgtgcatgcttgcttttttcttaccaagttgcagtcatacaaatatattagatattataggttggagatatttggacttttaaaaatgatgcataaaggggatgacaagccacagactggtcttcaggtgcacaaaattgtcattttcttcttttgaatgattgaatttaatttagttattgacactgtttgacgctgtcaatcacttaaacttgccaattcaagtgaattaaaacttaagttctaggtgactatagttaaaacaatttattatatattccaaaatagctaagagaggctttcgaatgttcctaacataaacaataaatgcttgaggtgacaggcatcctgattaccctgatttgatcattatacattgtacttatgtatcaaaatatcacatgttctccataaatatgtacaataattatatatcaattaaaaataaaaatagaaaaagtatgcatactcaaaatcaagaattaaaaaagaaacataagacttagctgcttttgactgggcacagtggctcacacctgtaatcccagcactttgggagaccgaggcgggttgatcgcctgagttcaggagttcgagaccactccgggcaacatggtgagacccgcccccactccccgcatctctactgaaatacaaaaaatttgccgggcatggtggggtgtgcctgtagtcccagctactcgagaggctgaggcaggagcattgcttgagcctgggaggcggaggttgcagtgagcgagctgagatcgcgccattgcactccagcttaggctacagagtgagactctctccaaaaaaaaaaaaaaaaaaaaaaaaaatctagctgcttttgggttaactgccttgtttagagactaccccttttcctgtcccttctcctggagtgacctggggcaggtccctctgcgtgccctgtcctgctattgttactctggcccacgggctgtgtcttcgacatcccagcttttgtcttttctacttatgtgttggaatattggcaatgctgtctgcccctcccactctcctgctgcatgtccctccccccacacccacccccacactcactgccaacccacccgccaacccatccgcaaggctgcccccagggctctttgcccaggccatctgtcccatcctctccaacctggctcaggctgcacaggaggctcctccgcaaagttcctaggtccagtgacctcactatcaaagctccaacacctctgctccaggccccaataaactggcctcccggttccaatccacacctgctatgcagggccagttagaccccctgagactgggctctgcctcagtccctcccaccagaaccggggattcacagaacattcatcctcactcagaagagcattgctccaagacctccagacatcagctgttgagatttaaaatcaaaatttgggaagccagaaagcctttttcttccaggccatcactgccgtacacctttaagaagcgattttgaaacacaaagccacaggctgcttctgacctcactttccttggacagaagcttcagcttggaaggtctactttttaaggatagagggaattaggaaataaatattgtgataggcacttttaaaaatgttatccttctgcatttgtactctaacttaatctttgcattcctgaggaaaatacaaaacaaaagaaaatttgtctagcttacttccctttcctcctcttcaagaaagtaaaggtgtttttctctgtccagaaaatttattctctgatttattatccaaagttctccaaggttggataatcctagaaaggggtgttactcctttcccagaagcttgaagtcccttgggactgcctcatttccccaacccagcttgccccactttccatgaaatactggttgatcaaatctccagtcctgtgggaggagcagctgtatttacttaaaggcaacagggaacgtgggctggttcctgacccaactcctacctctccctattcctctgtggagtcactgtccactctctgggcctcagacaactgcctccacatcagagtgatcatgggccagcacacaaccctcccggatatgccacattttccacatgcatgtgtatgggttttaaaatggtagagaagataaatttatctttaaaaaagaaaaataggtacattttctaaaatacccataagctattgctctccaagtgtaaataactggaagaatgttgatgatagctacctctttccagaaaatgagcctctaaaattaacaccaccctgcacctgaagcaagcaggttgctaatcaataaatgtccacttgcaattaggataacacatagttctctgagctgagagctaaattggtaattgctcttctgttatttcccatggttaaaaaaaagggggggggggggcggtggttgagtaacctggctttttgtttcaactttcattttcaacttgaaagcaaagacaatagcagaaagccaggtggactgggcatccttccttttgtttgcctgcttgaatacttgtgtttggagcatgtgaggggtggttccaagtcacttaagatgggcagtagtcaccccccttcttcactcagttgtggggctgtcgattctgggtgcccccaccatccttttaaggctagttctttgtggtccttattctgtatgtggtctgttcagagcattgatggtcttgtaccttcaggtttcatgggatcatctctcgggagcaggcggatgagcttcttggaggcgtggagggtgcctacatccttagagaaagccagcggcaaccaggatgctacacgctggctctcaggtgaggcgcatttcattccttgttttcattgctgtacaagtggcttcactgatgtttgcccatttttaagaattgtagcagagtatacataacacaaaattcatcatttttcccatgtttatgttatgaggggggggtcccactctctcacccaggctggagtgcagtggcacaatcatggctcactgcagcctctgcctcccaggctcaagtgcctcccaccttagcctcctgagtagctgggaccacaggcacacaccaccatgactggctaattttttttttttttttttttgaagagaatggggtctcaccatgttgcccgggctggtcttgaactcctgggctcaagccatccgcctgtctcagcctcccaaagttctgggattacagtcaggagccactgcacctggcctccttttaaaatttttaagtaaaattcagtggcattaagtacattattaatgttgtacaaacatctccatattcatttccagaactttctcatcatcccacacagaaacccactaccataaacaattacccctccctactccttacttgatatcttcacttgtttctgaagcaccagcagtatatcagagtttgtttacatttcctcagccgcagatgctatcggtaggtgtggacactgggactctgatcatggacacacagtaaactggagaaccatctggaaagttagtgtttctacagccacctctgcctgcaccatctagctggccgaggctgcagcgtctttgcctcagctcccagcagcccatgttgaaggaagggctccttcacctggccttgcacgtgcagacctcacaagacctgcatttgctcatggggttctctcagggttcaccttgttgaccccaggaacctgtcgtgagggcagtcatgacccttcaggccaatgagccagtagaacaggctctactgagcctttaccacaaaatcacaagtattaaacatcacaacataagaaagacagcacatttatggcacttttcaaaccttgatcaaatattttctgtcatttgatcctcgccgtagccctatacatttcggggaaggtatccaatttcagaactgaattgtcttccaaaagttcatttgtgaactcttcggaattggaaagccctctctccatagggggaatggtgtccatggaagcccttcccaggcccacaatggtgtgttccatgcaccatctccctattatggctgtgcaatgacactttccaagttgcaacatgtctacagcatatcttaaataatgtaattatgaggacgaacttaaaaagctattatatcatgcgctctaggtgtgcaaaataatttcctatcttcccagcacttcagtagcagaagctggcagttgtagtggggagtcaagcaggggctgtagatggaaggtcagggcccagagaggagggaacctctaggttagattgtggggacactggcaacagctccagcagggagtttagcacaccttattgcttcccttctgctgcaccaactagggcggaaggcatggggtgctctgctggaggtggtaaagatgcgttaacaagggggcatcaggaccaggacagggcatcccttgcagaggtaattgccaggtatagaggagagctggttcccgttaagtaagtttacaggtaacatagttgtaaatcaggcattaccctctgacccttacaaatgagaaggatactgacaatgaccttagtgatttctaggatcaaacgactccatgtgatgtcctggggttaagccccacctctgcctcgttccagtcatataaactcaagcaggaaccgccatctcttcaagcatcagttacctttgcggtaagacaggcataaccattataccgtctcaaagggtctctgtgagcgttaggggaaaaaaaatcacatcaagtgcttagccctgtgcctgggatacactaagtattcaaaaaacgttagctgctattgttatcattccacactgtgcttatttctaacgtggttgtaatccctcattctctcacgggcaggtttggaaaccagaccttaaactacaggctcttccacgacgggaaacactttgtgggtgagaagaggtttgagtcgattcatgatctggtgacagatggcttgataacactgtacatagaaacaaaagctgccgagtacatttcaaaaatgacaactaaccccatctatgaacacattggatatgccaccctactcagagaaaaagtatccagaaggctgagcaggtctaaaaatgaaccaagaaaaacaaacgtcacacatgaagaacacacagcggtggaaaaggtgagctgtgtgtgatggaagcagcctttcgttttaatccatgccgcatcaacaggcgggttaactataggtgcgatttgctgaaatgttggaggagacccacccccacccgaagaactctagaatgttagggccaaagggaccttagaaatcttctagctcaggccgggcgtggtggctcatgcctgtaatctctttgggaggccgaggcaggtggatcacgaggtcaggagatagagaccatcctggctaacacggtgaaaccccgtctctacaaaaaatacaaaaaatcagccgggtgtggtggtgggcgcctgtagtcccagttacttgggaggctgaggcaggagaatggcatgaacccaggacggggagcttgcagtgagccaagattgtgccactgcactccagtctgggcaacagagcgagactccgtctcaaaaaaaaaaaaaatcttctaggtcagccccctcattttacagatgaagcccagaaatgtttgatgatttgttcaaattcatacagtcagacccaggacttctaccaagtcatttgtgggtttatttggagtttgaaagaaaaaaaaaacaaacctccattaatgtattatgatgaaacatgttttcagtcaccatttgaggtgtcactggctccatctttagttccacccagccggccaaatacgtggtatttgtatttgcttctcttaggactgggtgactgcccatgatccacaggtcaggtctcttgaaggtggtcttacttagataacaggtttcactgacagatatgggagcatttcactgacagatatgggaacgtggctatctctgggaagtagaaagacaagctgtcctttgccccaaagttattatgcctcaccaaggattaaaaaactcctaagtgggcaagtatgcaggcggggggtagattgtggcaggaggcggccagggagatctgattttcctctccagtaagttgctgtttgtttgaaaggcaccaccagagtttgctagcagatttttgggatgtgccccttgagggaccatctgctttgcctggtcctatctgtttcccactgaaagaaagtgacagccagccacgccaatcagcccctgcagagtctgtgctgagcccggcttgtcaggcacactagggctgggacagatagaaataagcggataggagctacagccccgccacactgctccttccagtggtcactaatcctagttaaaccggaacgggcctcccgtcgtccagtgtcaatgggaagcaaaggagcctcgggctgatggattcgggactggcattggcagaggggcttcatcagaaagccctgagagggaggagggcggggtggcaccgtggtcccgttggtggagacagggatcatgtcaactgatttgctgattgagcttcagatcctaggagaaccttccacagaatcacatcagtgcagcagctgggcccatgaaaatataatttgccattttctttttataactccagtgtctccaaagcacctgtttattcttttccaaataattgctttgggaaattgtggggtttctgactgtttacattttaacaaaagagagaggacttgagtcccaactttcagagtttgttccggtccagacaaaagccattccttagtctgtttgcaaaatctgttccaaagtaatttagaatagaaaatatgaaagccgaccttcccagccatgacaaatcagaagatgaattgtaaaataaatctctgaagcagtgtttatatttctgaatcagagagcaaagtcactgaaaaggcaatctgttacaaactgcaggatgcacactagaacagctcaaggaaaagaggagagcaggaggagtgtctcttctgtgttagggccgacttgagatcctgggtattgaaactgatatttctagattcttgtccttccctgagagggaagtttggtcaacagaaactgatatttctggacaatattcctatcaggaaacttgtacctcaaaatatgcccccttgtgcagatatttttgtatttatttgtcaaaaataaattgtggaggaaattaataatccaattaataatcactttgaatgagccacccaatatacatttacctttttgggaaacggtaaatcaagaaaatattgcaggaagacaccccaactctctgagcagtttgatggacgggtgtcggtggtgtggattttcttggacactaatgatgtgatgtttggttgtcccaagggacactgggcctggtcacttgctggggctactcattttgttagtagtttgttaagttacttggtacgaatccatccgtttctctctgacctatattgacaagtggaattattaaaggtctcagccttgccagagattctgtttcccttaaaggcagtcagtggtccattgcgatggagtcagtgactagaaaagagggactggaaacgtgaatggcttcactgagaagagtgggtggggggagggtacctgtttgctttgctaagggcgtgtcttgaaggttttaatgagtgaaatgagcaggtttcctaatatttctcaattccagacacaccagcatttccgtttccaggtacttaaatttcgttttctcatttgttttattgatcgtttccaaatgaatccagagagacgatgttacctgtgtatccaagaatactaacgcagtaataattggcaaaaagagattacctactccatcagatttgagtggctcccagatttctctccagtcatgattgttagcagtaaacttgattttaataaccgtagatgagatggagaggcagggaggaaggcagaaaaaaaaaaaaagttgtgatggttagccaatagtgatccgtctccccactgattctttatttagttggatttaaaaacattatgatgtatgtgggccaccattcggtgcatctaattaaaatggtcacatccagtgtcatttcttctatgaaacgcatttcagaacttattccatagatggattatctactgaccttcacatcactgtaagcaacaaaggaataacaggagatttaacatgagctcagacatttagtgttaaacacatttcacatatgtgaactaatttcccattttatcctcagaaccactttgccaggtccgtagggcaggaatcaccatccccatcttattgaaaggctcacggtggcagggtgaggaatcagacccaggcttcctgattccacgctcaaagcttcttaaatcaactgagcagttgtgcctcattctgtgctcactgcccttagtgctttgagcgaacacccttggttttgggccatcctgaggcaagtgatgctaaaagtactcagtatttacatgatctgtttctgaaaacagatcatgtaagcagaaaactgctattacgagctataataactagtattttcttaaaaagtataccctacgaatccaatgcatatgacaacagtgtttttgacagcacatttttattcaataaatatggtttgtcatattaaattgcatctgtgttttagtggggaaaaaatgatccatgcccttaaataataaaagcacatttaagaatatattataccagtttatccgtttcactgttcattatagcagcaaaaattagaaaatgaccttaatgtccatcaatttgagactgcttaaatggattatggtacatccatgttaaggaatatcacacaaccccaggaaaggaatgaatgagaaccctcatatgggctgatgtggaatgggcacttggaatcgttatatggaaaagtacctagcagtgtggtgtgtggagtatggtattatttgagtaaactagtagaaaaaaatatttttattgatttttattttaaaattgtatgtatttattattttttaaagacaggatctcactttattgcccaggctggtctcaaactcgtgggctcaagcgatcctcccatctcagcctcccaagtagctgggattacaggtacgagccaccgcatccagccaaaaaaagctttagcatatatttttttcatgcaaagtcataaatatcccttgaaggatgcaagagccagtatcactgattgcctttgaagaagggaagtgggtgtctgaggggtacagtgtggaaggagatttttccctgctactctttcagactcttggaattttaaaccgtgatcgatgcagtgccctatttaaaaatttaaataagagaaaataatgcgctgtgtattaaattcacatacattaaagcataccctgaataaagaaacattctctgtatggagtgcttatgtcaccatacacacacacacacacacacacacacacacacacacacacacacacacacacacacacggcagttccaacactctgcacccaggctgtttcttctcagctcaacccgatgctgataggacactttcatttctccatggggtctttaacgaagagtctgtgtttagcagagttttactaaaggttggagctgggagagcgtaatgatagcacagggcgcacatcattaactacagtgcagtgtgtctgcccctggcagtggattggctgctgctttcttccttcctggcattgcctcccctgacacacagacccctcagctgtgccctctgggaccctccccagctctcctcccattaaccaccccaccatcaccacgcctttctcaaactgctgccaagccaactcccagagtcctcttgctttcttagggcaggcaccgaagccctctttggtttctactttcttcctgcaaaaccaaagagagttaccttttctggactgaaggccttccaaccttactgggttgtcctttacagatgaactgtttcatcagagaacaacctctcccctcttgtctcccactcagcgttttgtttgtttgtttgttttttctttctaaattattttcttccttcccagctgcccgcctttatatccaaggtggtcctttcattggttgtttcactgtttccatcatgtgatctgctggcctgtcccggtatctttgcctaggaatgattccctacaatgtgcttgaacagaggccgtggccaggccaaggagtgaatgtccagccctcgcttactggcagaagtcttcatacaaggttgagcctgtcccgagtggttctccccagtgccatgctcgcatctcatggctggtgtccccgtggtgactctgtgctcatcagagtgttattgttgttgctgtaattctgcaacagctcttatttgctttttctctaggacagagttcaaattccttacaggaaatttgcagcctgtttaagcctgggccccttggagaagcaaagcctgagactggggtttggtacagatggggaatttggaaaggcatcccagggagaggaggagaagctgggcaggtaaatagaggaggagagaggctggtatatgcacgttgtggagctgatcaccttctcaggagccgggtagaactgcttctaagaggaattgaagtgggagtgtttaacgcatcacctcctgtcccctcttggttgaggggtacctgtgagctgttaacattctccccagttccaggccaggcatgctggagagctaggtgggtgccatgggcatccctggcagcctgtggagtccagtgcagctgtccttttctactattgaatagaacctgccacactcagcctcccctcccctccccgccctggcatgctgcacaccacctttatgagagttcatcaccctgtgtccagcgtcattgttttgatcagtggttctcaaagcatggccctcgggaaccagcagcatcaacatcagctgggaggctggttagaaatgcacgttcccaggagccactgtgtgggggactctggggtgccctccgccaatgtgtgttttaagctttaggcagttctgattcccacctgcatttaaaaatctgtggtttctatgtctgtctctttccccagaggtggatcagtgggaggcagaggctactcctcagcctacttcctaattctaacgccctccacctcactcggtgaagcaagcactgattgaatgaaaaatggatgggtgacttttaaaatgtaacacattgccccacattcaccctaaggaacagcgtatctcaaattcaccaagagggtgcctcagcatctcccgcaccgtctctcagcacgtgctccttccttcactgggctaagatctggccaccaactccttgtagcatcaggagcagcaggagtctggagaagcaggggaatcgtggagaccatctcatgcaacccttctgttttgcaggacaggaaactgaggcacccggctcaatagcttagaaagtatttcagtgacaccaaggaggcttggatagaaaaggatgcttttcagcagctatcttagagttaagattgttgaggccttttttttggatgggatccacaactgtgccactgtggagggggtcttggtcctagggggtggagaggcttggtgacttcattcaggacagtagattcaaacatagtgttacccattgtccttcaccaagcagaggcgtgcattcatttgccaaagaaagaacctgaattgttaatgcagaaagcattatggagctggaaaagatcacttgcattacagggtctaaagaacctatagattttctctgcaggaggttctttggaaataacatgtaactgacatacccagtcttttctcaggattcaagggtaaatgaagatgagcataacttagctattatagtaggtgacaggtaccctgatgatgctgaccagccgacttgctgcccttgcacgcagtcataaaatggggtgggataggatgcagtgagaatggatttaacttagattacatccgctcatgagactgggttttgccaagcattgttttaaaccagaattccctaatgatttgggatttatcactcagtctgagcaattgctgatttggttggcttggtggttctcaaactgactgaaggttggactcactctgggagcttttaaaaaaatgcccatggccgggcttggtggctcatgcctgtaatcccagcactttgggtggcagaggctggcggatcacttgaggtcaggagttcaagaccagcctggccaacatggtgaaaccccatctctactaaaaatacaaaaaaattagccaggcactgtggcacatgcctgtaatcccagctactctggaggctgagacaggagaatcacccgaactcagaaggcggaggttgtagtgagcccagatcacaccactgcactccagcctggacggcggagtgagactcagtatcaaaaaaaaaaaataaattaaattaaaaaatatatattaaaaatgcccatgtttgaccccacctgcctatggaatcaaagtcttcactggtgaaaggcacctgtcggtcttttttggctcctcaggtgattgtcaagtgcagggcttgagaacctgggttagatggaaggggagacgagagtaaaggtgatcagacattttggagcattttctttcaaggacacctgtctcacttcttcccatgcctcttatattcctgaggctcttttatgttgtaaattagaccctagccttctttctctacttttacacaacacgtgagaagtcctctggggaaacattcttcacacagttaactctggtggctacagttacctgtgctggttcagggtttggctttgctccctttccatgactcctttcccgagattattgcctgaaatataaatgatgggaaacaattaactgaagtgggattaaagaatttaatgaaggggcaaggaaaagttagtccctctctcaggggtcagctagtggtttctttgggtggatattagaaagaatctctttttaccagttcctcaatatcggtgttttcaaagaggaacggaagaggaaagtcatcctaatacattcagcgtatggagggatatgatgggccaaacgccaaaccctccttgtccccatccaaaatctctctaggaaacagctaatttagagacacggctcccgagaaagtattttctatgcaaatagtgccatcttgtggctgaaaggagagttacatgctgatgacacaaaggaccaaacctaacggatgtgaaaatgtgcaagaacaaatttttcagcaatgaatccattgagtcatcccactttcctcaagttttatagcacagatcaggctacacagtggcttggggtgtctgttctgtagcctgtgctccttctctgcataagcacgtgggcagctctgcgggcctaggacttgtaaaaatcatcccaggaatctaattctagtccaaaagtgctcaaacttctcggcctcaggacccctctatactctttaaagttactgaggaccccaaagagcttctgttaatgtgggttaaatcttgatatttatggtattagaaagtaaaatagaaaaatctaaaatatttattaattctttcaacataatagtaataaacctattatgtgttagtatgaataacatatttttgtgaaaaataacactgttttccaaataaaaaagtgatgagaatattggcattgtttttacatttttgtaaatctctttagtgtctggcttaaaagaagacagctggcttctcacatctgctcctgtattcaacctgggatatattgttttatttgaagtataggaagaagtctggcctcacacagatgtgtagttggaaaaaagaggagtgttcttatagccttttcaggtaaatgtgggctttaaaatatatactagaccacaattcaacaagtggtagtttcttaaaggttagttgcaatgtcaatcacagaaggcaattactgtaataaaatcagttttgacatcatggactctctaaagggatcttggggatccccaaacattggtgggccacagtttgatgaagagcccagcttttcaagatgtttatattttgacatctccagagtggtgtttgagaggaattgtcccaccacttttatcacctttgactgcaggaggtaaatgatgctgtcacctgggactgctgtacacctatggggactgggcaggctatgatgaggaggcattcttctggacctgacccaccaagcgcctgccctgagcacgacctcagagctcttcccagtggctctcactaggcggtggggggacaacaggctgagtctatatgagttttaattttagggatccctctggggttgttgaatgtttttaatttcatcgaggctttttaatcatgggacttttaaataatttattctggaagaaaatttttataatgtttaaaacagggtagtgtcttgtttatattttagttgggcttaatcgtaggaacagtgttggtagatttagggtgattactttcatttttaaggtgaaattgagctgtttttgtctttttagtaattatatggtggtttttggctgtgagtaaaatattaatgtttgtttattagtctaggtgggatgatatgttaaaaagataaaagacaataatttggataagtatttagggttctcttgattaaaggtttttttttaattaaataggtttgaggtgagaaatggagagtatatttgcattatgtctgtgggtcatctattggcacttagttttttaattggtaagcgttgaaatagagactcttgtttgaggagtcttagcccctcacctaaattgggtattttgttgagtatgggatgtgagattatacttgacttttttgatttgtttttctaattaggggagtttgtctttttttgtatttttgtttttgaagaaactggagggaaaaagttataggagttgatgaaaaagttgaaggagagtgttattattttagacctttgtaaggggagaaaaagttgaaagtagtgagacatagtaaaagttgaacttttgatttataaatttgagaagtttttaaagaatgactgttacatataatgctctagttatttaaaatattatctaaaactttaaaaacacagactttcctcctcaaatccctaaactctcctcccttactccctagccacattaaaaattccccatttctactttttattaaaacaaatttttaaaatcttgccttccccaccttcttactttaatcagatcaaataaacatttctctatctccaaacacctgtgtatcactatttaacatcaactacacaccaagtacacaaacctaaatttagacttcaacacaagcctagggcctgtgtcatcaggaaacagttctgcaggtgcaattctgatatatatggccaatgaggagccaccgactgggtctcattctcttctccgtacagaggaaataccaagactcaaagctcaaagtgacattgaacaaggagggttggaaggaggaaacacaattttagcagagcctattattttccttctttggcctcgtactgggtatcaccctctttgttacctctcctgggcttctccagctaccatctttgtgtctatttcatcaggatgtggcagtctccccaccccacccccagagtgagtagctgtcatttttgccacccagagccacctcagtgtaggagcttctggtggagtcatatctgcccactaatcccagaggtggatttgtgattcaaggccaagccgaaggaccccgtgtccctggctagggtggttggttcaagggtgaccatgtggtcaagtcagagccaggggaagacaacagacttttaccgtgagttccaggagccaggcctttcaccctctttctgcttggctcaattaggcaggaagtagagcctgggctgctgaaggcttcccgccacccgatagagcctgagaatggagcctggagaaagtagagcctggagatggggagagagaagctgagtcctgaggcctgatctgagcttctcgcggagctgcccttcagcccgcccccgtctctggatgttccagtactgctggcagttcattgctgccttgcctttgagctgggtaagcagatgttggtgctgcatttaagtcggcagctgctatcatccccacaagaactggaacccacctgtcagctccctgccacctctgctgtccttcattcccactcaccttacttgtcaccattactgaggaagcttagctattcaagttcaggttcattttaattttaatccaataatccacactacccttctttaaaatggtggtgttaaatcagaaaaaggggacctctagtgtttactgaaatgggtaggaatgtagcatcttgtttaccaggcagacatgggaaataacccagaagccactgctggaatgcagccgtcatcctttacctcctggctccacaacatatatatatgtagacctcttacagttaaatgcatttcagtaagattaaggcgctctgctaaagagtcttttttttttttttttttttttttttttgggagacggagtctccctctgtttccaggctggagtgcagtggtgccatcttggctgactgcaaccttcatctcccgggttcaagtgattcttctacctcagcctcccaagtagctgagactacgggctcacaccaccacacccagctaatttttgtatttttagtagagacaggtttcaccatgttggccacaacggtctcaatctcttgacctcgtgatccgcccaccttggcttcccaaagtgctgggattacaggcgtgagccaccgcgccaggacactaaagagtcttaatgaacctggtaaaccagattctcagcaacttgtgatatttccgggaaacttttttaacagaatgggatgaaacatggccccttttgcagcattggatgtggccacgagagccctctgttggaaggggtatctctcagatcattggtacaacagatgagcagttgggaacctgtagactctgaagaaggaaaggtcaaagttccatttgtagtctttcagaattaaaggcttggcctataagaatttgtaggggtgggtgggtggggtcctggatcaactgtgggaagaagaaggattttgttccctgaataattcccattgccgttaatggaaatgaaactgtcagggctacattggtttgttttcatggcctctggaccaggttgcagaactggcattactcattttgcaataaaaaaatgtctggccgggtcttatgatgatagtttataaatgcccctgttggttttctctctccttatacacaatcactttgaagttcccgcaaagttaatatttcactttgttcctaagtccccatttatgaacttaatgaagtccaagtatcagaagagaaagttaaagtttacacatgcaactttgattgttctcaagtgactcattggtttaaaaaattatttaaaaagtcaaagcactgtcatttgcaagagacactttaatacccaagttgaggattagaagtaagacacagaactgtgggctatgcgtgtcccaacacacctttaacagagtaaaagcagttatattttaccacagtacatataaattccatgaaaataattcatgatataagggacttttattatgttaatctcaaatgattttaggaaagttacaattactccccctagaaagaacattacatgtattaagcatatcattgtttttaatctatcataaactacattatttcattctgcttcatgacaacccttaacttcattgttcctcctcttccaacaaagaaacaagaaacccggggcttgggaaagccaggcgatttgcccagggtcgtagaacttgtgacttgcgggtcatttcacgaacagccagttgctagaaggtggctcgtctgacttcgaacaggctgtactttccactggaccacattgacacagtgagcagatttgctgtgtgtctcattttaaagcttctaaacaaagcgttatattaggaattattttcctcttcccaatatcggtactcagtgtccttgtggcttgattctaatcgtcttctgctctggactgatttgttcttatgaagaaataggtgtggctgagggaattcctcgagaagagatgtgttcattacacacatgcctgcctctgtgatttctaagagaacaatctctgtgtgcatttttagccttgagctatatgaatttgaaaaggattgggcaatactataaagctctgtatacctttactatatcgcaaggtgatgagtctgaaatgtgagtcttcagacacaagcatgtgtctcacttcttccagtcatgatggagtcagttcagatgagaggaaactgaaattgatgttaccctcctgaaggttaggaagtgatgcctgacccagctctctctcagtgtagctttgaaacacccccgaactctgggattgtaaaatgatatacatggagattttaatgcattggattttctttcccctccagtaagttcggtgtaaaaatcaacctactcacaaggaaaggaagaagtgctagcacgcacggggtattgaccacataccacgtgctataggggtggctttcagtttgtcaccttcttccgtcctcacaacggctctgagagttgggaattggagcggtggaagtaacttcttcatgaccacccagtgggcaggggagctgaaaccctgccgccagctgtcctggcttgaaggaaagcctcttcaagagctcctggtcacctgagattgaccaccgcctgaccccagtgtggcatgcaaggccttttctgacccttttcttgtcaccctgtcccccaacacacgcatgcacacgtcgcttcacctcagctgctccctctccctagctgtgtccaagaggccggcaaaacagagcaattcaagttttctgagcccaacagccagtgtaatgcctctcagcctttacacagcatcttccagttctttgcaatgtccctccccattgccttccccaggctcctgtcctgacttggggaactcctgccatgctttgtggaccaatcctgggcatatccttccctgcagtcttccctgacctacacaagcctgccttggttataccttcagttggctgcctctctgtagcttagatacagttctcattgcactgagcacaccccaccggcgtgttctttcattaattcattcatgcttaactattaataattaataataattaaatattcattgagcccctaatctgtgtgaaacacggtgctgccaattgcacttacaacgactagctcgggatgggccagtgacataggttcagtaaggcagctcctgggtctttgctggaagaattaagaaagaagtggactctttctgcctggacttgctaaggcacagaacataaacacggagcgacaggggccacctggctggcacttggggagtcagacatcaaagaatgaagccatggaagaaagctgatgctagagatggagaatgtgttaaaccaagagcttcattctggagaggctcaagtggggagttcccaccttggttttctgtgctggtacatttctctttctttttgttctatgctattttgggtggagtttctgtttcctatagccagaagagcccgaatggagtcctaaaaacaaaaacaaaaacaaaacaggccatgcctggcagagaaggcccttctaaggaagggagtagttgggccagcctcgggacacagttggtggaggggaaggctgcgaggagggagatggccaggttggagaggggggaggctggagatgggcgggcttgggaagggccacataaagtagtctccaaagtgtggatcttatgcccaaatggcttaaggagctgcctgcagtgtgatttttagaaggatacattggtggcagggtagaggatgggctggagacagagcctggggctctgggacatcaatgcagtaacattgaggcatctgcatttttgctttcaaaacccagttgctgtaggcaaaattttaaaagcccgccttttccatttttaaatgatgacactattaccaaagctaattgtcatcttagacttgtaagtgttgaaggcctaagttggttaaattgttttttgtaagttttactgggtttggggagaagagtgggaggaagcaggaaacccattattccacggggttggataaatgcggccccacagagctgcgttaacctacagggcttctgtgttcaagacataaccttctattctgcaaagccctctgccattttccttaaacatacacttggaataagtgatgaatgaattagcgtgtttgcattctttcttcattctgcctgctacctgcaaagacagaactgtagtatatgcctttctcagaaaagctgtggacttcaaatattatctctgttgaattttatcataaaataaaaaatactcattaacctgaacttcacagtcttaacctttagaagctatgaaaaagttatctactaatgaaatagtttaaaggatattgaaatggaaatgttgttacttaagagagcaaaggttttcttccaactcagagtatacactttaaaatggggtgaaaaagggcagcagtgttgaggctgctaatcatgttggctcaagtccagtagttctcaaattttagcgtacatgagaatcctgtagaaggtttgttagtacacagagttccaggccctctcccatcgtttctagtacagtaggtgtgaccagcggcccagcttcccaggagacagccgatgttgctggtccgggaaccacagtttgaaaccgctggcccgggcagtagagtagcacagttaagtatataaggcaactggagaagtaaggctaaatgacagtgattaattagatgtaatctgtaatcatatgcatatgtatgtatgcgtgtatatgtgtatgtatatgtatatgtatatttccagcatttttatactgactctcatagaatataagcaaactgcaccttaggcgttctctaagtagtgattgctttgatgcgacatttcctcccattgtggagctccttgctggcccctgcaggcatctcccctgcagaggaggtgctgcacagtggttagagcgtgggcttcagggccagtggctgtgtggctgagccctcctaagcctccttcccttcctttgcatgccgccgggtagcatctcacctgcaccttcttcgaaataccagctacctctgcagcgcgtcctctccttctggctcccctgccagggccccagctgctcgcagtcctgagctgcgcctcactcagttctgtgaccccgcaggacttgctgcagcaaatgggcttttgtatttccaaggtacttcatcaacatttgttgagaaaaggaaggaagaaaaaaggaaaaggaagagagagggaggaaggaaggaattttcccaggttgctcattgtctttgtgacatttttttactgtaacccttttttttttttttttttttaagacagagtctcgctctgtcccccaggctggagtgcagtggcgcgatctccgctcactgcaagctccgcctcctgggttcacgccattctcctgcctcagcctcccgagtagctaggactacaggcgcccgccaccacgcccggctaattttttgtatttttagtagagacgggatttcaccgtgttagccaaaagtagagaaagatccattaggcagaaaacctagaagttatttaggttgaaccgtaatgccactgttgatacctgataagtttttgatttgcaaaaatcaggcaatttcatgtggttcaaactaatatctatttaatacgaaggtatatgaatcctggtaagaataacacagtttgcaagttttagaatacagtccactaggagtggatactaagcttgcagtttatatgctctggaaggccctctttaaaaaaaattaaggcaaaaatactagtaaggtattgtagatggtgccacggagaggcccctgcctgagagaaccttggaacttgagcatgtgcttcagagcttcatagtaaagacacgtgctaggggcctggcttgaagatggcagctcctaggacaagcacatgtgaggctggagagtcgcttctgaagaatctgtagaatagcacacccacttggcaggtaactcaggtgccagaaatccatacagtctgctgagtcaagtggagagatgaaggattgctggagcgccttgttggttttgaacggtgctatttccaagacaaaatgagcctccacgtcggacagacttcagaggcagacagtttgtcctttcgtggaagttctcacgttcgtatgtttcatgcattttccctcagatgggatgttttggagtggaagtggagctaactaagtaaatgtaagccacaccaggcagacacccaagtagggagcaggaacagaagctgcggaaacttctcgcggaagcgcggggaggaggcatgatgccaaacatggagtccttggcattttcagaaaagttgctgaggggcttgcaggagagttgtgagatccagaaattactatttgactggggagtggtaggtgcctttattgggatgctttaaagaaatcctaattccatagttagctgagcccagcaaacacaagctcatatgttaggagtggatgtccagaaaatgaattctttttttgttttgtttttaaatctggaagcatggcttatctgattgccctctgggcttagcgaaagcatacaccccgttgagtattgtgttctgggccacagcctagctgctacttccctcagtttccctctgtccaggggctaagctcactaagattcattggtgggaggtggaaagaccaggactcgtggtctcctccctcgattttggaacatggaactaccagacctgccaggatggtgcttttttccttggcgtgcctaatttaagtgtttaaaatgcaagtatttttaaacaaatttgacaaccacaggatgtgtcaattagcactctatgtatctggtagctctgccagtctagcctcgtgcttggcgaaactcagcaacatgaatattcattaataagcccataagagggattctgatgaactgaaattctggattttgaagggccagtcaggatgacttctcagcgtaccagtatgcagtgggcacatggtggcagttctttttttaaattttccaagaactgacaactgttaggccagtcttgggtgtgcctgtgtataaagtttctagcaaacttagagtcaactttctggggtagacacctcaaggctttgtttaattgttagttagatagttagaaataatcaccaccaatttacacctagcacagtgttctgaatctactaccagattaaaactcagtctagaggtattgggaatactggatattcacatgcagaagaatgaatttggactcttacttttcaccaaatacactaacattaaatttattaactacctacacataagacctaaaattatagaactcctagaagaaaatataggggaaagctccatgatattggggctggcagtgatttcttggatgtgacaccaagagcacaggcaacaaaagcacatatagacaaaaaggataatatcaaacttaaaattttctatgtgtcaaaggatgcaatcaacaaagtgaaaaggcaacttatggaatgggacaaaatattgcaaatcatatatctaataagggtttaatatccataatgtatttttaaaaactcctacaactcaacaacaacaacaacaaaagtaaataacccaatttaaaaatgggcaaaggacttgacatttgtccaaagatgatactcagatggccaacaagcatatgaaaagatgctctacatcattaatcattaaggaaatgcaaatgaaaaccacaaggaaatattatctcacaccggccgggtgcagtggctcatgcctgtaattccagcactttgggaggccaggagttccagaccagcctggccaacatggtgaaaccccgtctctactaaaaatacaaaaattagccaggcatggtggcacgcacctgtaatcccagctactcgggaggccgaggcagaagaattgctcaaacccaggaggcagaggttgcagtgagccaagatcatgccactgcactccagcccaggtgacagagtgagactccatctcaaaaaaaaaaaaaaaattatctcacacctattaggatagctacaattaaaaaaaaaagtaacaagtgttggtatggatgtggagaaattggaagccttgtgcattgctgctgagaatgtagaatggtgcagctgctatggaaaacaatatggcagttcttcaaagaaacaaaaatagaatcaccatatgatctaacaattccacttctgggtatatagccaaaagaattgaaagcaggatctcaaagagaaatttgtatacccatgttcataacagtattattctcaatagccaagaggtagaagcaactcaagtgtctatggatggatgaatgaataaagaaaatgtagtatagacatgcagtggaacatactttagctttagcttcaaaaggaaggaaaccctgtcctgtgctgtaacatggatgaactttgaggacattatgctaagtgaaatatgtcagacatattctgtctaagaatctttgtttatactaagacaaatactgtcttaatatgaggtatctaaagcagtcatattcacagcaacagaatgtgaaatgcagaatggttgtcaagggctgaggggagaaggaaatggggaattgttcaacaagttttagttttgcaagatgaaaaagttctggaaatcaattgtacaacaatgtgagtatgcttaacattactgaactgtacacttgaaacagttaagatgataaattttagattatatgggttgttttttcttcttttctttctttttttttttgagatggagttttgctcttttgcccaggctggggtacagtggtgccatcttggctcactgcaacccctgccccccaggttcaagcgattcttctgcctcagcctcctgagtagttaggattataggcacccaccacctaattttggtatttttggtagagacggggtttcgccatgttggccaggctgatcttgagctcaggtgatccacccggctcagccttccaaagtgctaggattacaggcgtgagccaccatgtccggctatatgggtttttaaaccacaactaaatttagaaagaaaaactcaatctagagaagcagatagtaccaacacctttcttgtactttcaatgaaggtcaactcaagttcatttctcttgcccagcaccagaggttgatctgaagccagcctgtctgagagtcagcaacagagtcagccgcactgggactgttcagatcttcagcctacccaagggcagactccccaaattaaaaattaccccccatttcctgcctttgggctactttagtgcctctcagaagtgtcctcagggaaacggctctggaaggaagtaaaactgaaggcagagctggtaaaaagttctgtgcacagaggaatgtgaggctactggctaaaaacgactgggtttcaagtagtcttgcacctgccgccctaaccacacataagagaagtgactattgggacaaccaaagctccttgatgcctgcacttcctcctgctttatttcttcatctccaaagggattcatccaatgacttcttttggcaggaacattctagctcagagaaggtgagctgaaaattaagaatagctgtttgaggagaaagtgagagaagggctcataaacgtctgagatagaatgtacgtgaatgtccatgaaggcaaccacatgcctgtgagtgtaagtcacacaggaaggtgctggccgatggtttgtatgagagcacccccatccttgccatggccacattaagaagctatttgaacaccggcccatatatattgtgattttctcagaggggaagatttaagggacttgaagaaagcagacagcgtttcctactgaaatgctgtcaggcaagctatgcacagaacttccagtcacatatttggtgactattaacatgggaatcaccgaatatgggtatatttttatgccacatagggacataaaattccctgctataatagaaaaatgtaacattctcctttgaaatatctgtactctgtttaaattagcaagtatacatggtcagaattcatgtatttgtgttagttttccaagtgaggatttttttaatgactttctcttccgggtcaagtgtgttaattttaaggatgactttagcactttttattataatggatcttttttaaaagaatgatggaaggttgggcgtggaacctctttcagcctgagctttaagcagccctttgagtgacctgatggatgtcaaatacacacaggtgcagcagccggcacccgccaggtgtgctatcaattccagccactggtatactactagtttttaaggtagttccagagtcatggttaaaaaatgaagtctctgactgtgatgtttcctgcatgatcaaggtcaaattttaaagtcattttccagatctaatagacggcctctctccctggccactctctgagcaaagtagccatagctgagattttccttcacaaattaaatatatgtatatacttagagaagcagttgctgatgttttgaaaaaggagtatttacttagaaaagcaaaacaaattagtaaactgcttgctttacataaataaactctttggaatcatgtggtatttctacgagatgtcagggctattacctgtggtcagataaatttgcatcttacaaagctaaccaggtttctttttcataggacttctcggtgggctagcttaccccagaaatctcccagaggggctggaagctgagtggttcccacttttatctgcccatggaaagctttcagtgctggacatctctcaaactaatgttctgagaaacacactttgggagaagtggggcaaatgcaaatgaaaaatagagaaaaagcttccatgtttaggggtgtgcttcgtaacttacactgttacagctctttttacatacttgacttgttaattctacttccttcttcaggctgcttttgactttggcctgttcgtaccaaaccttgcctatcaaagcgttatataaattgctatagaaaagatttcaactgaattaggaacaccaaggaaatgctttcaattcccagattcatagaatgttagcacccagggtggagaaaagaaggaaatgacggggacgtttatttcatgcttatgtcccagcccagtgatggccagacttgtctcccctgacaatcagtgggtgctggaatgcactgcccctgcaccccgcaggactgaagactcattcccccagcagctgggcaggctgcaggcagacgcccccaggtgaaggaagctgtgttgtccaaagcccacatccagtgactgtgtaacctgagggtataaaagctcagcttctttgctgcaatttgggacaagtctgaaggaccagccacacttcagaattccctggggtcagctggggtttttgttgagactgccttgccatacctccccctgcccaatcttgcatcctgtgcatgccactggccttggaatctgcttcccagaaaacctggccagcaacggttctccaggaaggacgaaatctcaggctaaaactggaagtggaaagtagccactttattttctttttaattcattttaatttccatctcaagcttccattctgcctaatggcaatatcatagtctttgtcaatttagagtaaattcagccagttcagggattccctctccccacttccccctgggcttacgtctcctttccatgggacttcaggagttgtcatctctctgtgccagaatccattgaaacatcccatatcctggtcgcaggctggtttgtagtccatgccccatttgtagctgcatcctttttggctcaaatgccaggtcttacctggcggctacctctcagtgccacgtccttgccactcatagctgcaagggaaggaccattcttctgcctcccactcatggtgggctacttggggacaacatgaggttgcctaatttgccactatagaaattgtttgtttatagggcggaaaacccactatagtagagttccattgtttagcactgaagtattattcaaagtaagtgatttagagttgtccagaaagtcctaaagaagaagttattttttggtgtccctgggtgaaatagaggccgtcagacatgttctacagaaatagtttttaaattagttccatgcaacctcccacattgctttaacatatctttattgagtaccttccatttatgggtttgttcaagatgccggggacatagtagagaaacacatagggaagacccttgatctccccagtttttttttaaataggaatttggtccctattaaaccaggacatcttcagcagtgatttcaatatgaggaccacaaacaagatggcatttgctttcacttcccctgtcggagttaggtgagatcccactttcggtggcctcccccaagggaacatcagcactaccttctgctcagtcaattgtcacaactgttgactctctaaatagtcagcaacttagactttctccatgaattggcagtgcacaggccacatctggctgacagacatgttttgactggttcgtacattgtttttaaaaatatttttaattttggagattttacaaacatttggatttctagtttctcttttttaaaaaaaatctgttaggccaaagttcacagcctcatatggcaaccaatttagccagagtttaagtactgcctcgtccaccgcgctgccttcagatggggcaggtgctttgcagttcagcacagtctggtcagacagccaccctccctcacctcctttaccctctggcccctggaggcctattcctggaggattttgtctttacattaatcaaggctgacaaagctgcatcctggagcttgtgattctggccccacctactatagtatttacctgaccaagctttggcttggtgctttgcacctgcatcaagagatttgacaagcagtggatgttggtgactcacacactgttgattgtgatgtggactgtttcacacccttaacaaccatctctatgacagccattggtgttgattgagagatctcactcgttcgctgtccctctagcaatgataggatgaaagacccagcccccctgcggttgggtgaggccatatggcacttcagaccagtaaagtatgaaaggagatgatgtagatttccagatgagtgcattgtctgcctgtgcaagatgcccagagctgtcttctcctcccactactgcaatcagcagcatccaagatggtgggtgctgccagctgagtcccggagggaggagacacggagcagacccccagctgaggaacagaggacatggagcatgattgagatgtagatcttggtagatacaagaaactcaggttttgggatcttttgaccctgcagcatgacctagcctgtactgagtaatacagtccataaaagagacttctccaagagtcctgagaaaaattcttcttagaagctggtttccacttatcttatggatcctaagaatcttctttagcttctaggaactttagacctaactgtagcagaagtggggtattcgggtaggtgttctgacttttcccctggtttaatcttattttttctacttcttatcatattgtaaggaggctatgatttttttaagggaagatcaatactgtatataaaaataaattattatattgatataatttactttcaaatacatgtatatgtctcccttgaaataaattaatttgtactgatataaaacaattaaaaccctgagaatttgctgtacatatcttacagggtgtgtgcatgaatgtggtatttaactcttgggacttatccagaacttctttttaagagtggactgtgggccgggtgtggtagcttacacctgtaatcccagcactttgggaggccaaggcggatggatcatgaggtcaggagttcaagaccagcctggccaacatggtgaaacctggtctctactaaaaataaaaaaattagctgggcatggtgaggcatgcctgtaatcccagctactctggaggctgaagcaggagaattgtttgagctcgggaggtggaggctgcagtgagccgagatcctgccactgcactccagcctgggtgatagcgagactctgtctcaaaaaaaaaaaaaaaaaaaaaagagtggactgcaagagaggttaatggattgtaggacactgggatttttgcatcagaaatgttgccttcagaaatatcttaccttttatatggttaataataaacaattatggactagtagtttaaagttgccagtggtaaagtggaaatatttataaggaaatgtgtgatttgagtttcttttacgtatttatttttgtttgtataggagaacttgctggcatttagggttatttgccattagttgcttgaagtagtgacaactgcccctagattccttccatgacctttaaccctagcaaagtcattcttgcttaaaaaatgacatgagacatatccagtctctctggagttaccttcactactagttttctattgctgtgtaacaaattaccataaacttaacaggttaaaacagcactcagatgttcactcagttctgtaggtcagaagtccagcagactcagccaggttctccactcagagtatcacaaggcccaattaggcatggaccaggcggactcttatctgagtgctctggggaggaatgcacttccaatctcatgcaagttattggctggattcatttccttgagtttgtagatatgagctccttacttccttgctggctgtccgctggggactggccattgctcccggtggctcccatcttccttctcacatggtccctccgtcatcacgtccatctgccagtgtcaagtctttttcacactcttaatctctctgacttctccttctgcccacagctggagaaaactctctgcttataaaggattcatgattatctggctgggtgcagtggctcatgcctataatcccagcactttgggaagccaaggtgggtggatcacttgaggtcgggagttcgagaccagcctggccaacatggggaagctgtttctctactaaaaatacaaatattagttgggtatggtgcacatgcagtaatcccagttacgtgggaggctgaggcacaagaatctcttcaacctgggaggcagaggttgcagtgaactgagattgtgccactgcactgctagcctgggtgatagagtaagactgtctcaaaataaataaataataaaggattcatgattatccacctagatcacatccctgtctttaggtcgactaattacatctgcagaatcccttttaccgtataacataatcatgtaacatgatgtcacatggcataatcaggggagtaactttaggtgtcaaaggtcatagggggcatctgaaattctgcctaccacatcctctgtccactctgctacctcgcttccatagtctttggtaactgcatttctcctgtttatccgctaccaactcccatccaaactggttgctactcatatatctgttgaccaagcaagctattagttcaagtgtatattttttattctttttttttttttttttttgagatagagtctcactctgttgccaggctggagtgcagtggcgcgatcttgtctcactgaaaccaccgcctcctgggttcaagcaattctcctgcctaagcctcctgagtagctgggactacaggcatgcaccaccatgcccagataatttttgtatttttagtagagacagggtttcaccgtgttggccaggttggtctcgatctcttgacctcatgatccacccgcctcagcctcccaaagtgctgggattataggtttgaacctccgcatccggccattttttattcatgtttatgtgacatgtttggaataggtggtgcaagatggtgatgagaaatatttgggtaaggttataggcagcatggcaaagtaattgggagcacttggaagcacaaactctggagctagctaaactcgtttactagttgtgtgactttggatattcacttaatctctctctgcctcagtttcctcatctctaaaatggggactatgatagcaacaacttggcaggattgttgagaggagtgaatgagttagtagagtgcttaaacagacctggcacagggttaccaccacatgagtaagcattttaattagaataatgccagatgctataacacatacattcccacatcttagtggcttaatgcagtcaaaggtcatttcccacttgcatcatggtccaatggggatgtttctggttgggttgcattgtttgtggtcatttaagaacccagactcctaacatcctatggctctctctctaaatcactggctctcaaagtagatccaagaaccctgggttccctgggaccatttcaaattcagaccatttccacaaggccctccttttccaactgtgtctctgcaaaagcctggattttttttcatattcttcaaccaacacaacaagtgaaatataggaccagatgtgagaatccaactgtcttctatcaagttagataacaaagagatttggaaaaacgtgacataatgctacttttgtcatttttttgtttgagccaatatggttaatttttatgtaaaaactacttatattagcacgtagggcctataaaatttatatttttgtatttttaatgtattaatattctgaagttttctttgtaagtataaactgatgcaacccacagaagcaaaagctttttggggtcctaaataaagaatataaagaggttctgagaccagagttgaagatgcaatgatgtaaatcctgagaggcttttctggtcagctggaaaatgagtctctttgggccgcactggggaggtttctatgggccagtcctggaagtagcacatcatttccactcgcattttcattgagtggggactgtaactggctactgctcaagagaaagcagaaatggatgggtcaccgcctcccaatctttacagtagttgactgttttcaagggtttattgcctcttgccctatgcatatcacaagtatcttgtttagtgttctccaagagcaataacatttggtttcatatactcagaccacttcagaaaattccagaatgagcctagtttttgccctagtcatttggaagttggcagacacttatctgaaatagctatgcatttaaccaagtaagtaaaagaagagatatcagtctttttagaatcaggtggtattgcagtaagagtgaaatagtctataaacatttctgatctcctttgaaactaacagtaagagatggtgggaactaaatttagagactcttttgtttgttttgtttttggttcgctttgatatctgataccaattatataaaatctactttataagttgagaaattgatgacctttgacaagaaacacacaggttgcccatcttacactttttggaacaaagcatgagttacacacacacagacacacacacacacccatacttcaaggttcagttccctggaatatgtgttcaaggttcagttccctggaaaatgtgattgagttttatactaaagctttgagagcaggacttgagtgggtcctagtacagacttagataaaattataaggtagaaatttgatttttatatttgttgtgactagattaattttagatgtttatattacatataaatttggaaatgtatctaacaatatggtgtacttttgtgctttatatggactttattatatataggaaccttgcgtaattagcgtatagctatttaagcttcgtagctatatcttcgatttcatatgctgtttgtgttataattaattggcagtataagacctctgtaaagaatagaagcacgctgttccaaggagaaaaggtaaatccactttaggatgctcccctttaggaggccatttctactgtacttagaaagaaacacgctttgcataggatatattgcttaatattttcttagagtttaaaggtagcaaatctttgttgagtaacagagtccagctaaaagatttaaactgtgcagggcatttgttgtttcctgaacagaaaggccaagatatggtggtttcaggatgcgttggagctgatggttttgtcatggacccaggctcttttcattgcccctctgccagccccactacatggcctacccccttgatttggtcaacaagtgcacaggaagattgctgttccatcacaggtgttaaaagctttagacaaattaaatttaacgcagtttagttgagcaaagaatgattctagaatcaggcagtccctagaaccagaataggttctgagtgacttggggctgccacgtggtcagataacatttatggacagcaaaaagaaagtgttgcacagaaaatgaaagtgaggtgcagaaacagctggattggttacagctgggccgtggccttttttgagtctgctctaaacaactggccacatttggttggctaaagctcagctacgagagtagtttacacatcaaaaagtctgtttacgcatcagagtaggttaccattcactatgtatggagatgagacacctttaggccaaacttaaaatatgtacgaaggcagttttaggccaagcttaacttaacagaggcatcacgtgacaatgtcctaagcagagggtaagaaagatgatagcaaaaaaaaaaaaaaaaaaaaaaggggacttctccacttctccatccctccctttacaggagaaagcctctccccagcggactttccctcactgacccctgctctgtcccatgccctcctgtaagccagtcattgacaaagtgaacaaggagccataattggcttggactgttcttagtcaattcctgggatccttgcatgttgctgcctaagcctagtcagggtcctgctggcgagtaagaaagagagagtaactggggggcagagaatctgcccccaagcctaaccagtaagcgtacctggtatagggaacacccacaactcatagaatatgatcaaagtgcaactgtccaattaaaacgcttacatttagggaagttttgcccctgctcctgggataaatgctctgttatgccccctgacttttctagccacttgtagctaatagaaggccctaccatcactttcaatctcaaaacacaggcttattttgacaatcagaattcctagtcctgaataatactagaaaatccaaactggattatagagttaaatctctcctcccttagccacggctaacttcgggagggtgcctgctgcctggcaagggatgagatcagcttcttccctcatatttcacccttgttccctagctcactgcccatagggtagggatgcaaagagtggggagagttcttccttgactgagaccatcctaagaaggcttcacacttactgggcatggtgggcacgtttgtgggttcttagaaggttggttggtccactagacccctctgactacagttcttgcaacagaagaaatacataagtggcgatataacttcttctaaactgtctgctaaaccggacagtgaaagtgggagtgaatggggcaggggtagtcatgatttcaccaggccaacagtcatgaaccgagaccatctaacacctgtattgggcaatcagggaggagggccacagggccaccttagcaatgcacagattctccagtggccacactcccatcagcccctgcttttccaacaaagaactctcttttcaagtcccttaaccttccagatggtcctgatggcctgattttgagaaatgctcagttaggtggaaatgctattgctttccagacagggccctctcatctcaccctgcgggctgacagccttgggatctcaccctaagatggctcaggtagcttcaacttcggttaagtgccctccatttctgcaggatttaggggtttgggactcacagctgagtggatcaaaagaatctccttatgaatcctttcctagtgttcaaccaccttccctgttttttttcactgccagtgtgagtgtgggatctaagagttgtgaaccggttttccctggttcctttgatacactgccttttgacggtgtgcctcactgtgaaattccgtagctattcctacggtgaaacattcagtcataacatcctgacccagaagcatgaatgatatgtcttgctataatacagtgatgtcccaataggctattggcattcttcaggggtccaagttcccacaagggatagcccaaggctaataccttttctagtctagtattgtttgctattctcttcctgctgtcagctatgaactctacccacttccctctccccataatttgtctccaagtttgctgatcagggcaacccagaaagcaatggagcttttcaaggttggccaattaaaggatcctaactcaggaatctatactatactcgcctactaagccataagtacaatggaagtgtgggtatgtgctggaaggaatcaacatcattagtaaatacatatggaaatgtgatccatttcgctgtacctggcagacctgtatttaatagttttagactgaagaacagaggacaacagatgtaaaatcattttataatgatccctggattattttggactagctatgcgtcacgggtaatcctggtttatctctcgttgttgttttgttcatcgttagggtattttcagcagctgtccctggccttttggaatataattatgtttttctctggagctataatttgtctgctgcaaccagaagaaaaaggtttgtgtggaaccagagctgacaactgggaggctgtagctccggcattcttctgttggcgacagctctgtaactcctagtgtataaaaagacattccagaaaatggttaccaaaaagaattcttgcacggatatagtttttccatcagagggatcagctcttactggcaggagtgctttatttagggctatttctttcattcagtgtttaagtcagcagacacttatcatgaccctataatgccaaatgcacagtgctacatgccgtggggggagatttttttttgttacactttggcaaaaagtgatgtgtacacaaagaaatagaatacaaagtcatagttgctttatgttctattgtgataaggtccggaaacccaaaaaggacctttggggtcaaggaaaatcttgtgagtgaaatgggatttgaaagatgtgtagaactgggaaggactgggctgaagggagttggcaagagccaaggtcacggagtaggaagtaccagtgtattttccttgtcttgaccataagtgattatttatattacagtgactatttaatggatatagattttttagagtgaaatgagacgtacaggaataaaccagaagtgtcgtggacaaacctagatgtagagttgcctgatctagaaagaaccttacagggccgggtgcagtgactcacgcctgtaatcctggcactttgggaggccaaggcgggtggatcacctgaggtcaggagttcgagaccagcctggacaacatggcgaaaccccgtctctactaaaaatacaaaaaagttagttgggtgtggtggcacatgcctgtaatccctgctagtcgggaggctgaggcaggaggattgcttgaacccaggagacggaggttgcaatgagccaagatcatgccactgcactccagcctgggtgacagagaaagactccatctaaacaaaaaaaaaaaggaaggaagggagagggggaggaagggaggaagggaggaagggatgaagggaagaaaggaaggagggagggagagaggcaggaaggaaggaaggaatctatcttacagttctctgttaaccacaactgaaagagataaaccggtagtgtgtcctggatgtgcaccaacctctgaggatcttccctcttggccatcttttcttcctctcctaatttgtactcttttccttggtaaaatgaaaagtgcactaagatagattaggtggtgggggttttgaacctcaccaggaaagcctatgcagtttcactttcttttgtaagtatctgcattctttgccccgcatcaccacactagtcaactagatgctgctaatgtggttctgattataactcgtctgcatcccagagagctaggagtgtctgtaacccaccatgttctctgccatgagaaatgtaaaggccccttgtcagtttcatcaggctgctatagcagataccatgaactgcatgccttagaacaacagaccttttttttttttcttctcaattctggaggtggtaagtcagaagtcaaggtattttctgggccatgctctctctgaaggctctaggggaggatcttctctggcctcttcctagtttccggtggttgccagcagtccttgactacctcattccaatctctgcctccattgtcacatggcattttctgtgtgggtctctgtgtacaaattcctctttccttataaggaatcctgtcattggattagggcctatcttaatccaatatgacctcatcttaactttattacatctgccaagatcctatttccaaataaggccatagtcgcaggtactggggttgaatatatcttttggagaaggtcaccacaggtctaaagacatagttctttccttcagaaacttgtcatgtacagtatttggaaaagatattaacaggccagcacagtgtctcatgcctgtaatcctagcaatttggaaggccagggcaggcagatagcttgaggacaggagtttgagaccagcctgggcaacatggcaaaaccccatctctacaagaaatacaaaaaattagccagacatggtggcatgcacctgtagttccagctactcaggagctgagttaggaggatagcttaagcccggaaagtcaaggcttcagtgagccaagattgcaccactgcactccagcctgggcaacagagcgagaccctgtctcaaaaaagaaacaaaaacaagcaaacaaacaaaaaaaccaaccagatcataatgagagaatgaaaaatagaagccagtaaacatatccatctgttcatcaattattttttaagagccaaatgagagaaaccaaaagtgaatggtttaggagaggagagtgatttccaaagcttgggctctggaccagagaccaacagcttctgcatcacctgggggaactgttagaaatgcaaatacttgggtcccagctcagactttctgagtcagatactgtgggggtcacatgtcacttaatgacagggattcattctgagaagtgtgtcattaggtgattttgtcatcatgcaaacaccatagagtgtacttacacaaagtaagtggtagagcccactacataccttggctgtatggtgtggcctattgctcctaggctacaaacctgtgcagcatggtactgtactgaattctgggggcaactataacacaatggtgagtattgtgtatctaaatatatctagacacagacaaggtacagttaaaattataatattataatcttatggaccaccatggtatatgtggtctgtcattgaccagtcattatgcggtacatgactaaattttaataagccctccaggtaactctgatacaggctgtaggttaagaaccaccagtctaggaattcagaaaaagcacttttcttcaagctggagtggataaaactgccagcagcagccaaataaatcattaagctgagaaaaaaaattatgcacacttctctaaatcctatcagaagcgcctcctttttttttttttttcttttttcatgttttggatcatgagaaggggtgaaagttggattctaggagataatcggcccagaattttaactaaggtgtggaatgaagcagtcttctctcactagattttgcttgccctaaagatgcaacatctgccctgtaaacacaaatgcagcatgcatggcaagccctggagtgacgcctcaagttggagaccatagaatactagagaggcacacccaaacctttgaattccctccagccctggggatctcctgaaagggcatattctgattggggactgggctggggttcaagattctgcatctctcagcagctcccagggatgctgggctgctgatccagagaccacgctttgaccagtaagactagggagcatgtcaaggactccagtacctatccacattttttaaagtaggtaaattggcttttatatacctatgcttatagttgaatattttgtttgaatattgactattatgcttgaatattgattatttgaatattacgcttgaatattgatgggaaaaaagctgccaacttataggtgctcaacaagcatttgttaaggtacagttttgaccttggagtttcatttcagtccccgttgtccccagcttggctatgtgaagggcaccctgaccctggactaaagagagacagccctgccttctgattcttaatggcatttggtctcatgcacttccaaggattgtgcctggtgacaccccccaaaaaagtatttgaattctccaaagacagactatagaccacaccgtttgtcccctaagttattaaccaatcatgtgaatataaaccaacaaatttctgatacttctgattctctcttaattgggatgatatttgaataaataacttccagtgtacattcagtgaaataggttcctaagtattgggcttacaatacacattcacagaattccccgggtcttaaacttttatattccaatcaatcctaacctttttttttaagctacactttaatatcagtttattgcttcttattaaaattaataataataataataataaaatttactctttgatcttactgttacataatatgctcactgaataataagtagaggatacagataagcaacaaagataataaaggtttttgaaatccaccagagatactatttcctgccaatgtctacatctatgtaaatatatatttgttgtatctttaaattttaaatttttcagtattttattgccatattcttacaaaagtcatttaaatattacatcttcattgtacacaaattagacaataaagatttaagaaaacatttgttgagcatctgtacctgacctagtagagatttccaaggccatatgctggtgcatatcttctcagcatttaagatatctaaaaccggctgggcgcggtggctcacgcctgtaatcccagcactttgggaggccgaggcgggcggatcacgaggtcaggagatcgagaccatcctggctaacacggtgaaaccccgtctctactaaaaatacaaaaaattagccgggcgtggtggcgggcgcctgtagtcccagctactcgggaggctgaggcaggagaatggcatgaacctgggaggcggagcttgcagtgagccgagatcgcgccactgcactccagcctgggcgacagagcgagactccgtctcaaaaaaaaaaaaaaaagatatctaaaaccataataggccaaaaaccttaagaatccaaaagcagcttcttcctgctaagaggcttagcataatttctctcctgggtagatagctctttgcttagggaaaaaaaaaatacctatatagattatttcgaaagaaaaagccttcagagcatagtctgaaaaagacaggaataaaataaaaagctattatatcatttatatttaagttaaatatacaaatatatatacatggagcccagaggggtcagagcaagaggctagagcttcattggggtgtcaaggtcagtaagaatggctgaagagctttaagaacccaggtgtctaacatataattttgagtggatttctagatgatactttaacgaagctgtccctcctggtcttacctcacccttatctcttagtgtagtaaaatctgcaacacatgtagatttgagagtggaacatatggggataatggtgatgtctgtcatggatactggtgggcagaaaaaggacagtcaatgaaggggtaagacacagagcagcgtgcaactctagccaaagcaggaagcagttcccaagggggcataccccacaccagcctccaacacccagaagtagctagagaaccattaaaattttttacctattgaaataaacactatgcagattcaagagattcatgcagttctacttaaatctggttaaagtaacactagaatcttattatttggcaactcaaaggctggttttttttctttcttagcaatttgttctgaacatatttctagatcaccaaataacctttaacaaaatcatttttaatggctgcgtagcaattcattggatggatgcactgtaactaatttaactaccttctatggttagatgtttaagttcattcttttttttttccatgttagaaacaactctgcaatgaacatccttgtagctaaatctttgcaaatgttcaactatttccttagattaaatttcagatatctattttacacatttgcactcatattaagatggatagccagtgtaactttacctactttgcactgtttggggaacctctttcctctcctcttatgccatgagatcatgtgatttttgtcctgttttattttgttttcaggaaatatcccttcatattttgtatctccctttggaacattctgttttagatagccattactggttgattaaacaacctttgttgagagtaatattagaaacagacagttgtacattgtagaaacaattgtttagaactattcacaatattattttgaattcctcttcaaacattggagaggcactgatactgttttcctattatcttagtttcactgattcactgactagtctataaccagagatgcctgtttacctcatatctatcagagggctaatgaatgtgacatttgcctcattaacctattattcatcctacaaaacctactgtttcttgagagtctgctgtataccaggcctattaaggaggttttgcctgtattggttttcagaggacaaaaaggagacttccctagttgtacagaactaaacagtcttgtgtcatgatattgtcatcatgaatatttacacatatgtgggtgccattggaatagaaaaccagaagccaaactggacatgtagtgacagggacttaatctttttcagcctggtattctgagtacttaggatggaactttgcctggtatataacaaccattcagtaaaattgttgaactgaatttaactggcttcttcctgttccttgactctgccatgttcattctcaccttagaatggctttgcatgtctggtgttctctgcctggggtcttcttccccacaagatctttccattcttgcgttttcttgtccttcaggtgttggctccagtgtcgcccctctaagaaggtcttcttcagctgaccatcctcactcaggccctcttcatccacatcccccatatgaccctctgctgtctgacatcatcatcctcagtgatatgcttgctggcttatgtcctgcttctgctcagtagatgagtgaggttcctgtgtctcttattcacagctttgagcctatggtccagaatggttcttgggacatagtcagaaatatttcttgattgaataaatgacctaagtataatgtaaaacaaccactgtggatgttgaattaaagccacactaacagtaactcacacttgtctagcactttataaagtatttccatgcacattatctcattaggttctcacaactctgtggagttattatctccattttacagacaggcaaaccgagtcttgtgaaggttaattaactggttcaagttccacctagtaagagaaggagctgggacttgaaccaggcttgaagtctgactgtaaaccacatactggtgacaagaaatcattttgtcagaactatcttttaaagaaagcgagactcctagtacagtatgtttagaaacaaaaatttatgtacacattgaacacaactccaaattctgaaaaacaacaaattctagcaaggttcatccccctcactgattatagcatggtagtttatctgcattaaatatgctcttttgtggctaaaatgtagtatatacctaagacaacctcacaaacatagcatttataggatacaaaatgtttgtgcaattcagtctttagccaatggcaaaagtaaaagtaacagtaatcagtgaaaataatatatatgttagagggcttgaatgcacaatggttatcatcactatacaacaattaaagagtgcacagaggctgggcgtggtagctcacagctgtaatcttagcactttgggaggccgaggcgggtggatcacctgagatcaggggttcgagacaagcctgaccaacatggcgaaaccccatctcaactaaaaatacaaaaattagccaagcgtggtggcacatgcctgtaatcccagctacttgggacgcaggagaatctcttgaacccaggaggcagaggctgctgtgagctgagatcatgccactacactccagcctgggcaacacaatgagactccgtctcaaaaaaaaaaaaaaaaaaaaaaaaaaaagaatgcacagagaggaaaaggagtttgagaaaatgcagtgcaaaggactgctaatctgctttcaaggtgtgtgatatccaaacccgtcatcaaaataagaagaaagcccatacatctgtggccaattgattttttggtagaagtttttatttcatatttctccattttttgacttgaaagatactagaacttattttttgttttttattatttattgacaaattatagttgtatatatttatgaggtacaaagtgatgttatgtttttttaatacaatgtgaaatgattagatcaggctaattaacatatccatcacctaatatttgatattttctataatgagaacatttgagatttactctcttagcatggggaggtgataatcaaagtacacaaagcctcagttaaagagaagaaataaatttcatttttttttgttgagatccatgtccaattgatttttgacaaggatgccaagagcattcaatgggagaaagaatgaataatctctcaattacatagtgctgggacaactggagatcctcatacaaaataatggagttgggctacctcacaccatctacatgaactaactcaaaatggatcaacaacctaatattggagtgaagacttaaaagaaaacatttctttgaagaaaacaaatggcaagtcttcatcaccttggatgtggcaatggattcttaaatatgatgccaaaagcaagagcaagaaagaaacatagaaaattgaatttgatcaaaattaaaacttttgtacatcaaaggatattgtcagaaagtgaacagagaacctacaaaatggagtaagatacttgaaaatcatatatctgataaggctgttatatttcaacaaccaaaagacaatctaatgaaaaaataggcaagaaacttcaatcgatatttttccaaagaaaatacacaaatggccaataagcacatgaaaacatgtccaacattattagtcattagggaaatgcaatcaaaaccgcattgatattacctcacacaccctaggatggctataatttttttttaaaaaaaggaaaataagtattggtgaggatgtggagaaatcagaaccttcatacattgctggtggaagtgtaaattggtgcagcctctgtggaaaacagtctagcagtcccttacaaatttaaaagtagaataccatataactcataaattccatatctaggtgtataacccacataattgaagacaggtactgaaacaacacttgtatacaaatgttcataacagaactacccatggtagccaaaagatagaaacctgccaaatgtccatcaacacatgcttggataaacaaacggtggtatatacgtacagttgaatattatttggctgtaaaaagaatgaaattccgatacgtgctacaacatgcatgaactttgaattgtatactttaaaatggttcatttgatgttatgggaatttcatctcaaatttaaaaatctggaaagaaaggaaagaagtggctcagaagccacaggaagggtattagttgtaactccccatcaggtcagattctcatgactcaaatgggtgcatctcaggttacagtggcctaaaagctatagtggtgtatgtgggagggagggtagacacgtgccaaccaaataggattaggctgctctgtgcagggttgattgagctcagcctgatctgcatggacaccagggcttttatttcgaaggtggattggctctatttgttgttgctatctctgcttagtgttatttgaagggctctttcagttccagactgtataaataacaacagaatcgtctgttgataactgaaccatcccactctgagagttcagggtatttacctctaattcccaatacccacagccaggtttcagtgtgcacacagcctgacctggtggatttctgccattaaactatttcattttcccacatgcaagagtgtcatatgcatatattgtgtctgtgttctcatgtcaatttatactgggcatgtatccacaaccattctcctaactaccgctaaagtaaacaatattgtcactgatactgcatacatacgaggtcgttttaaaacagccatttattttttcagcgattaatacctgaatgctgcctaggtttttccttatttattccatttctatgattttctccacttaatccccatcgctttcaatttcattgaatttctttttttttttttttttgagacggagtctcgctctgtcgcccaggccagactgcagactgcagtggcgcaatctcggctcactgcaaactccgcttcccgggttcacgccattctcctgcctcagcctcccgagtagctgggactacaggcgcccgccaccgcgcccggctaattttttgtatttttagtagagacggggtttcaccttgttagccaggatggtctcgatctcctgacctcatgatccacccgcctcggcctcccaaagtgctgggattacaggcgtgagccactgtgcccggcccaatttcattgaatttctaactgaaatagaactgaatcagagcagaggtcgtcttgcccatttggatgtataagctgagaagtactgaagttggtcaacagcagatcacatatatgacagcatagcctaggtacatagtaggctctgccatctaggtttgtgtaagtacactaggtttgtgtcagtacatctgatgatgttcgcacaatgacagaatcacctaatgatgcatttctcagaacgtatctctgtcattaagcaatacatgactatgtgtgtgtgtgtatatatacacacaggcacacatctgtcatcataggttctactcttctgtgtttacaaacaacctcaatgtctcagtgccttacatggcaataaagatttatttctcacatgcttttcatgggttggctgcatctcttttttgtgttatcatcattccaggacctaggccaaaggagcagcccttatctgagacgtgctggcctcaggaaagaggagggggtgagagagagatggcaggggggtgagagagatggcagaggtgtgagacaaaggctctccctgctcccactcagtattgactaatgttccctccactcacattttattacccaaagcaggtcatatggtcaagcctaataagaactagacaagaacttgttagaacaagaattcaggaaaaggcaggaaatacttgaggaagtgtctaccattatattatggttcccacataaggcttctctaagttttgctttatctaagatactcacccatggttttgcttatagagcaactttccaagcttccagtagtttagaattgtgaaagaaattaccattataaattttatttatgctgatggaaaaagtaatatagtctttgaaacttgagtccctgtaacaaacaaataaatggattaacagtgtaaatattggaagtctatatatgcataccttttttatatttcagaataaaaaattctatttaaccctttgtaactaacaccggaaaatcctatttcccactcatttcagttatctatggctgcataacaaattaccccaaaatgtagtgactttaaacaccaagaagcatttgccgatgattctgcacgttggccagggctttcagagatggctcatctctgttccacatggttttgtctggggcatttcatctgggcccaaggaatatcaatgacctcactcacctacttggcacctgagctattgtagctgaaatggctggaggctggctgggcctgcctcccttcagagtctgtcatcctcagtgcctcattctctctctccacgtgacttctgtttccagcagcagttcaacttctctacaaaatgactcaaggcctctgcaggcctaagctctgaagttttataacatcttttctgccatatctttttggctaatgccaatcacaggactggtccagattcaaagacaaagaaactagattccacctctcaatgggaggagtggcttgcatatccagagatgagaggaatttttagtagccatctatgcagacaacttaccacactactcttggacagtttgcccaccctcaaccttgaaccaaataggatatatggtaccagatctgcctcatacattttgggggttgttagtttctagcaggcattcgatggtttggatacctttgaagacactttaggaggattacaagaaaggggaagaatcttgaatagaagaaaagagaggtttattctggatctgaagcctagagatctgagcagaatgaagagatagagacagaggctacgcaaaattctctcccattttagtctgttggtcccagctggtatgtttggttagtcattctcctccacgctttcttctggaacagaaagttagtgtcaattctggagaaatcccaccagtacatgtaagtagactagtgtggagcccagacccacagaataagtaagagtcccagctagattcttattgggaacactgagaaccctacctcctagccagacttaagggaacaaataccccaaacaggcctatctcatcccaaactcatgtctcctgttaatggagggagtctctgaactcagttaatacattttcattgccagactctgggaaatcatgaaatgaattcatctggccaccaaaaatgtgttggtacatgtagattttttattaccatgatttgcataaattatgcaaaatccagctctgtattatgtccttaaagcataatagtactcttaatcagctgtagccaattaagcagtaaatgattagcataataaatcctgcactgttgtgagagccgtcagtaaaactggtctgcaaaaggaccgttttttcttttttaagtttagatgtttaacccattattgtttttgttgccatttgtaatcactgctataatcaactcaggtttgctttttgttgggggttcttgtttttttttcttgttaaatatttactgttaccaaacagtaaatatttattgagtcccaaggagctagagtaaatttgatgaaattctatagcattttctaacaaattaaataaatcgatcatcaaatgggtgagatcagattcagtttagtcatcatggtagtaccaaaggcaaagaaatttaggtctccaattacggaattccaagcttgcaagggcccccgagattcttgccttactgtggagccggaagtggctactcgtgcagctctcttgaaaggcgaacatctagctcaatggttctcagccttggaggcacatgagcatcatctgggagcttctaaaaaccctgatgccaaggctataccccagaccaattacatcagaaactctgggtagggaacagaaacaatagtagtttttacagctgtccaggtgatttcagtgtacacccaagtgttgataaaagactacacattagtgtacactgctcgggttacaggtgcaccaaaatctcagaagtcaccactaaagtatttatccatgtaactaaacaccacctgttctccagaaaactattgaaatttaaaaaacaaacaaaagaacagcaaaaaagaatcacctttttagactaactcctgccaagatagagcagtagggacctaagattgccctgccttaggtccctactatatgccttagatccctatgtgtatctatatctcaaaagtgtttcagaaactggacatcagacaacaaaacagtgatccctgagagtctgaaacaaatgaggttagctctgcgattgccccagctgactgccctgagagaatgtccaggcagatgcagggagggagaactcaggcagggcccaggggactttctgagttgctgtgggtccagcagctagagttcacacgacccggtaaggaagatgagagagctgcccaaagagagaaatggagatctgggttactgttaggggtctccctggagtattcagcagatatcagtgcagcaaattcagccgtattagtgcatgcatgtaacaaaactagcgaggctaggaaaagaaccacacaaaggattagaggaaacagtgttgacattcatactgggtcagaaatagtggttttctccaccagctggagtggaaagtcttatcattcatggggccttgggagagtactcaggatgcctccatctcaggagtgggccacacttagccctatctgagcccagctccagatccgcccggcagatcacaaaagcaagacacaaaagggtcaaactgtttccaagtaactttaactgcatccaaaagcgaagttgaagaacatttatgggaatacaaacatacccagcgcctggcaaggtaaaattcagaatgtcagtcaactaatgaaaaattacagatgggggaagaggcagaaaaacatcatctatgaggggactagtcaatccagaactaacagagatgctacaatgagcagacaagggtgcttaaatgggcgttataactgtattgcttatggtcaaaaagttatgttgagacatggaccatataaaaaaagatccaaatcaaacctttagaaatgaaaattctaacgcctaagatgtaaagtacactgcatgtgactcacagcagactagaaattgcagaagaaaagattagagagattaaagacagaaatagaaactatccaggaatttttttaaaaacaaaaacatcatcagtgagctgtgggacaacttcagacagtctgatatatgtctaactggagtccccacacagatgagagagaaagggaggacacaaaaatatatgaagaaataatggcctcaaattttctaaatttgatgaaagctgtaaacccagagatccaagaatcttagcaagtcccaggcactaaaatctatacccagcacatcataatcaggtacctcaaaaccagtggtaggagggaggggtttcaaaggagcacaaggacagtttttggtgagagggatatgttaattttcttgaatgtggtggtagttttccaggtatatagataacatgatatgtgatatgagtgacaagtgaaaacatttcaagttgtgcacttaaaatatgtgctgtttattgtatgtcagtcataaccccaataaaactgatctattaacaaacagtaacaaccctgggtgcatattagaatcactgggagaactttgcaaaaaaatagaaatttccgtcttcaaaggttctggtttagatagtctgggatgaggcccaagcatccgtatttttaagagcttggcaattctatttggcaagtttgtttgaaaatcactggaaaaaggaaactgcagaaaccttccccatttacatgagctggtggttaatgacctttattctgactaagcagttttatatttcagggatatggccctttgaggtacagtgttaatttccaagttctgagttttctgtatctagtctttccacttataggtacgcaataccttattttattaaagaatgggattttgatacctctttccttatttttgaaactttctgggttttttttttcttttagaacattaatagcttcttgatattcccagaacttcacaacatcatgctcaaagtgggtccattgatttcttagtcgttggaaatgatcttgacctagtcatctgaagacttctaaactccacttgaagaaacacacagcagctttctcctaattctttctttagtttttacttttagtttatacatcccagcatgtcacttccctgcttaaagtcattcttcaccagctaccccaccccaagcttttagatgtgacccagtctcctaatacatcctgtaagatcccgcctcatagatcactacccacttcccttactttcttctttctagccataatgaattttcatttctgtaatagatcaccctgtaactcacctccaagtctttgcaaattctattccctttgcctgaaatattctcctgggctttttctcactgtttggctatctccttctcatccttaaggtctcagaggagtcatcacttgttttggggagttggggaaggctttgtgccccagagcacactatatctcccccaccttagcagttattgctctgtattataattgtttgttagcttctgttatccccaaccagactgtaaactccttgagaacagaaaccagtcctggcatccagtacagggcatggtccatactaaatgtgtgcggaatttaattcactgtaaaaaatggtgctacctcgcccttcatcaaacccagcatttctgatttacaagttaccaagtcagctcatggacattactgctcaaattcagccataggagcttcatactgcaagagagacttgataactttgcagcattaagttatttgccggcaagttaaacttagcagaataaacccagagtgaagtgtttccttattatttcacacaagggaaaaagcagaacaacttaggaattgcaggaaaaatgggaggctctaaataattaaggtgtgttggaattaaggtgagtgtctgaaaaaaaataatctatgtgtcaggaaacctggtttgaagcggtaataatggaaagcaaatctgaagttgtccttaaatcaatagaaatcattcagattcttatggtgggagactaataagtcagaatccgtcctgcaggcccagaacagaggtaaataggcatcattttgtaaataaagtattattggaatacagccacatccattcattgaaatataaaatatgggaaagttcgtactacaatgacagagttgagtggtccagacaggacagagactatatgggctacaaatcgtaaagtatttactgttggtactttacagttgctgatccttgagctaggaaatgaataagattatttgcattcattcagaatcatttatggagttctgtagtatgttgagcacagtgcctggcttatagttaactcaaataaatgtgggctgtgattgacattatagtggttgggcattgatgaacagacactgggctcaggtaaaggccctgctacagaaggcaggggtacagatgttcaaggcatgtgaagtaatttaggccaaggccaagcccaaagagcaaagacaaactgagctgggtggtaacttggtgtttactctgttctaaagcaaaccactcttggagaatgtttttatcactttcttttctctatttccagagaaaacgatcacaggccaagcttaatttgtggttagtcagtatttcactctgagttccgtgaagtggcttccaggatcttccctaggggatgtggtacaggtttaagaaattcagggtgtgtatttcacatcaattgaagaatctcttgaaggcaaacagaaaggttagtttcttctgtttgcagtgcacacttttgtttgcatgtgagcatgaatcatcagtctcctcactaagcataatccaagcagacgaagctcaaattaacactaaaggaaggtagcaagaatgagtttgtttttaaggattttgtggtaggcagaataatggcctccaaagatatcagatcctaatccctagagccaataactgtgaccttaccttggcaaaaaggtttatgcagatgtgattacattaagaatcttgagatgaagaagaatcttggataatctttgtggaccctaaataccagcacccgtctctttttaagggagaggcagaaggagatttcacagacagtcacagaggagaagtccgggggaagtggagcagagaaggatttgaagatcctggggtggtgcagccacaaggccaggcatgcaggaagcccacagaagctggaggaggcctggaacagattctctcctagctccagagggagcacagccctcgattgcagccccaaaaattcttttcacacctctggcctccagaactgtatgagaataagtttgccttgttttaagccaccaaacttgtagtaatttgttatagcagccacagaaaactaatacagatgtattcatcagatgaatggtaggtacattacttcattacttcttttttttttttgagatggagtcttgccctgttggcaggctggtgtgcggtggtgtaatcttggctcactgcaacctccgcctcccaggttcaagcaattctctgcctcagcctcccgagtagctgggattacaggcccccaccatcacgcccggctaatttttttatttttagtagagatagggtttcaccatcttggccaggctgatcttgaactcctgacctcgtgatctacccacctcggcctcccaaagtgctgggattataggcgtgagccatcacacccggcctcattacttcttataccataataaataagaaagagagagaaacaacaacgcacccccaccaccaccacattaacttctgctttagccacacaagtaagaacagatggtaaataatacaagttactggactggggttggaagagatttttgtctattatgatgctgagaacagtgcccagaacatgtaacatgctcagaaaagagcaactcaatacataaatgatatcaaggcaggtaaagttccgtgtgaattgtcagcttgtaatggcattaggaccctggatggatactgtgattaagcgtggtgcacagacagctgcctgtttgagagccatttgttaccagtccatggcgaaatgggtacagaagtacagaggtcttcagaaactacttcttactgctttcttttaatccactgattgaaaaaaatgacatagttgataaagagctgttgtaaattcaacaatgtttttaaaataaatttgtaattaattacaaatttattaattaatcacaatatattacgttttaaaatggtcatatacgcgaagaagagagaaataattttaggaagctgtatttattccaaatgtagagaattctccaaccacatataataatcatgagcccctgagagtccatgacctggaggttcaaagctacaagccaatcccaccaaggaaactagggtgtgaaggcactctgtgattagccccccgtcttacaatttagttagcatccgagacaggcccaaacccagagcttgtgtcttctgaatcccattccagtgcttttttagtagccactgatgtgacatctcatggacctcctagaggtggtctcctaggcaacctggtgcatgcccataggcctaaatcaggctaaagaaggaaggtcatcatgaccgccacaccacccgtggaggacagcagggtccttagggtcctgggcaggttgcacgtgtgtgtggccttgcactgagacaggccacacttgatttaatgccctgctgttgccttcttgaagttcttaataattttcaaaagagaacatgcagttttattttgcatagacccctacaaattatatagttgggactgtgcaagcaaggccgtttggatccaacttcattttatttctagtttgcttctgctgtcattctggagacacagccttcattattgcacctcaggatctgacagaccatcatctcctgggtgaggacacaatatcgccaggctgggcctcgggtgaaggaagggaagggtctagagcgcaaaagttaaggaggcccttactcttgggggtgtgtgaaggcagagccggcacctgagagggagtaccccttaaaaattgcagctcactttcctcacccaagtctcatcctgtagtacacctgcagtatgcctgtaatgttcctgcagacacctgcagtacagtattctcctgcttcctttgcctctgcgtgcctctgtggtcactgaattttcatcagccagatcaggtggcacacagaaacctaccccattgacttgttcttagatttttctaaaagtgttctttatttgctcagtctctgttaaggaagaattacatttccccattctctgcaagactcgccatggttggctggtgcatgctctactgtgtaagtgtaatttgatataaagctgaattgtcaatagcatgaaacattttataggaagagtgaaagagtagatggtggtctcattcattctgtcccggagagcaagagcagtgtggcatggtagcaagtgaggagaaatcagagaagctcagttctcatcccgactccactgcttcttccctgtgggacctcatgcagtgcttgtgcttcctcagcctgactttccttacctataaaaataaaactgtctctttcacatgacttttgagggtctaacaaatttatatttcttaatgtgctttgcagactataaaatgctagctggttgttgacactgattcttcagctttttggggggaattgttttgcatgatgagttcattctaagttgccacctgctatctgccaatggataaattccacagcatctcacaatatgagttagaccttggaacaggctttactgaggaaaagaaactgacgtcagggtcagccagataagatagaagggcctgctgaggccgctgcactctgctggttggatttgtggtccagggaggaacataccctccccagtcccactcccacccccataatctccttttttgtagggcaagtgggagagcacttttgttagtggggagataatgaaactactttggcaccaggcagcctggatttgagtgtcagctgtttacagaaattgtctgggaaggcaagtgcacagcacctggggaccttgggactaaagttgttaccctggaggaggacaccacttgtcccatgggaagaggagcctctccagctctgagagagagttaggacgcccccccacgccatagcatttcaacctgataattcagggtgaacatctgggctcattttcagacaatcctgcttgtaccaaagaagcatcattaaattctggaagcagggaccactcatactacccccaacattgaaacctaactaggtcattccagggtttattagtgggtggtttggatttgatagagagatcaaggcctacccaggctaaatctaaatccatccactaatgagctataataagaggattccattttaaaagattcactcgggtcctttggactaaaacgctgtcacagttgattcctctagtcagctttgtacctgcttttctgtgattgatgtggaaaccttgtgcatcctaaaatgctgcccttactcatcctttcatcctgacttgtagtctcccaccttccgtcacggcccgaaatctccacctcatataaatggcccagtgggtgccaactctagtggtggggacagggtaggtggactccacagcagtagacaaatcataattgcataatgtaaattttgcacaaaatgctctgagagcttaatggtgccacaaccaattttattaggacacttcaaaacaaagatgacatttgaactggatcataaaggataagtagaatattttagggcaaagaaaggggagaagggcatgctaggtacaggggagcagagatgtgggacttcagctgagataatatgtgtgaagtgtttagagcagtgtgtggcacatactaggtgctcaataaatgttagtagtgctagtcattattgctgttacatatcagggaatttcaaatacccagtatggctacaataccaggagggaaggtctggaaataaaactggagatggagtttgagattttttgtatgtgaagggccctgaatagtatgttaaaagagttaggttttgtatttgcatctcattttagccaactaatccacaatcatgagtgtcccagtgaggatgggccaggttaggctgcagtaacaacccccagatgtcagtggcaaagcatcaaacatttatttcttacccatgtgacatgcccagtgcagaatgactgtgatctttgcccagtgccctcctctttctgtgaccctgctgcttctgcccaaaaatgacacctatcactatttccatttcattggccaaaaaaagccacgtggccatcctaacttcagatggaacaaggaagtgcagtcctaccatggctacgtgactacgtgcatttgtcaaaactcacagaaacgcatgcttaaaatgagtgaattttactgtatctaaagtatgtgtcaacagttctgactttttaaaaaacaccttagtgcattttttaactagactgcttttaaaaattattaaaattatattgtaaacaaccccttaaaatatgatttgatttctaaaaatcaattttatggatccttttagaggcatcataacctgtggcatgctgctagtgctgctgacattcaacagccaggaatgtcttcccttcagggcaggggtaggcaggtgagcaatcctgttctcccaccatggctgattccaggctacggatgtaatgttactgagttagctgagaagaaatgcacacattttgagccaattccagcacaccactaaaaatgtactatgggttgacaatataataagcagcaaggtaatgactgtcctcatggtgttccaagattgcctcgtacaattccctagtttgctggtgatgcgggattagtaatcataataagagtgtcaatcagatgctacagctttgaaaaataatccaatagaatggtacatttaaagctagatgaggcctgagagatcagctagtcgcggcacagttgaggacaccctgaaaggtaacagatgtgcccagagtcacccagctgccacccaggtggcagaactggaaccagaaccccggtttcctgacttcctatttagtgtctttgtgtggctttccccaccactgcaggaactgtgggattccagtttttgaatgggtaccattgttcctagcccattttcagatatccatcttacaagtattatttttaaaaggtcaaaacattcagctaagccatgcctgtggtgaacaagtggcaggcaccagaggttggggaggggtgtcatgggctatttgatagctattggattcaaacaatgcatttctccctggagagaacagaggataacctgacaccttgtctgaggaccgtggtttacccccagcccgcgtgggaacctgttttcatgggctcctctggccgtgtggtggcccagcctttcgcagccccactcctcagctcaccctgcattaagaacaacaacagcagccatgtgctcagagcaagaccactaagcattttccaatctcaactaaactttggagtagccaagaagagtccttgggggaatgagttcattctgcaggtctgagggtggagtcaaaaccaataataataataactctatcataatattgactgtttgggggccaagccagacttgtccctaaatatgtctcagacttctttctcagtctgacaaatgcttgcccttccttcaaggctcatctcaatgccacttctttgaagatgtttctgaccttgaccttggagtacctcccatctgctcctctgaacgtattgcttctttcaccctgcccctggaacactttgaacctgcctttactacagcctgtttcacagagggttttgtgattatttgttcagatgtctatctcctcaactagaccaaatgtttgcttcttgaagtgaggtttgctctgtgtgttagacgtcattagctgccttcatgtggcctggcccagcccatggtgaagaaagagagagggggacagaagaagaaccattctggatcgagagcaaattctctgggaaagtgaagttcccctgtgcccattcatgctccataaatgactgtatgagctccagggtttaagtctcaagctcacaatgcatgaatgtccccaaggcatactcgttcaaaatgcagattcctgcccctgccaccacccgccccctcccccccaccaccaccaccaacacccctcttctcgccattctgatgtctagatctgaggtggggcccagaagtctgtgttttcaccggcactccaggtgatattctgattcaggtgatctgaggacacttttgagaagcactggtctccgactaggagggttctaggaatgcaggcatttagggcacagggagcgtgcagactcaggccctggtggctgcctcctgggctggggagggcacgctgcagcctgcactttgtctccagaaagcaccaggagctggaagatcctggggatattgcccttcatcttccccatctgcagcccagaatccttctcaactcattcaggccacagtcacacagaggcacactggtatgcctctttttccagaatattctggacaaatattcagcttattaaggatgcacctcctgaatatttttaatgctagtcattctgagctgtggaatagacatgcagggagctagcacgggcgatggcctgcagctcgggaacgtgaggcccccaacaaagtgaccacaaccagtgccaccatcagagcaggtcctggatgacctcaggcttccttcaggctgtacctcctctgctggcctcagcagtgacagcaccatgtcctttagtcaagccacacacatccttgaagctgccacattctctgcacagagagtcacgtctgtgctcccgctgagtgataatagggtcgtgacctccttggaaagggagaccatgttccttgcattgtcatcagcccccaggccgtctcagagctccccgtgcctctgcaagccccatttgatgaatctgagaacgagattctggaaacggtctgagtgctgagcagtacctgtcacactcactcacataacaaagtatgtttgtttcccagaagacagtcattgtatattcctactcattaagttactataattatacccacatggggtataattgattttaatttcactctgaggttgctccaggtttcaacagcaagtctctggccttggagaactctctccctttatttagcatttaaatgagtatcaggagggaaacgcaagaagtaattatgaggagaaaccgagtgttgaaaggggcagctttgaagtgcttaaacgtcctgacatggcagtgcgcgcttccatttcagtgcgtgggaagtcagctggatcactggggaacaagatgccctgacgttgatgaattgtgcagctgtactggggaccaaatctctcactcagtgctggagtgattttactgccatgcttacccatgactcagtggcctctgtttatgaattagcacatatttttaagttcttacatgttactgtctctgaaatttacaaataaatcatagtaatactacagtttcaattccccactctttttaaaaacagctttcatgcattatagtcataaatccttgttaactttttaactccatgcccctgttattgtatgtcacaaaagacagtgttatagtttttcattcctgcttaatttaaaactttcccaatggaatgcagatacagtgagctgttttcataggtgtggttagggagatatgttgtataattgaagcctaggtccctattttcagatgggacagattctaaaactagtgggatatgctgactccatttgaatctctgaactatgagacaagttatacaactagatcattggtttcctaagggaatgagacagtagctgtttgtataaggagcatagctgtgcacacacacacacacacacacacacacacacacacacacaccccatgcattacaaatagatgtagaattctaatgttagctgccctacctctgttctccaatattatataattatctgtttatgtgtctcacccctgcccccaactttttacttctcaagggcaaatgtattcccggtgcctggagttaatgtgtgtggaacatttgaagatggaaagtggtcctagctaagtcctcactttagaagtgaggaaagtgagggcccaaatatatcagattacttggccaaggttgcagcagtcaagacaccaagtgtgtatgtaataagcatatgactgttcgatcaaactaaagtattatccaaacgtcctctatcaagcgtcttagtttcccacattctcttggctatgtaaaagcgtgctttagtagagcagacccaccaaagaagataccacatttggctttggcctttccctttacctatctcatctgcaaagtcctttctgtaatgatcccatggtgtgatggaatatcagaattcaggagcggacagatgcaatgcccagaagatgaaattcaaccagttaagaactctgttgccttgaatttgacagtgatcctttcacaaagaagtttccctggttttgaattaagttacactaaactagcagggaccagttcctggttcccttttatgtagtttcagattttctcgggaatcctttggtattctgtgctatgcagtacacctcgccaggaacgcggtgggtcaggggtcagattctcccgctcggaaggctatgaaaggctcaagttcacacggtttaactttttaaagttctcatgtgtctttccaaagacttgtaggattttggaaaaactgtcatgtttcttccctcctgtgttttcatccttacttctttctcctttgccactaattctctttctctcactattcctccctgtcctttgttttccccatgtcatttggaattttccttttactgttgaaaggtggatgcagccctggaggaatcagggtaaggtcatgccggctgggccttctccctagttcggatgagactttccgagctcgcctcccctgcaggttgttcatgagataaaacctccgtgggtcaggtggagagcccacagttgcctcaagatgcaatacaacatctgtttcattgtccagggtggggaaggaacagataattctcttttgaggtcaagcagcaattccaggagctgacccagcctcacagagcagcccatagcagcaggtgggggcctctgttacgacagccaccttcaccgcaggccaggtgtgacatcagcctgcaccctagcagggctccttgtctccccctctcctccctgcatggcaggctcaggtatctaagaaagcaagaacatgactccagcaaacccacaagtggtagaagaagcccgaaaagcttgtctatcgttaccattagaaaccaggcaaccacaagaagaggcagagaagaggaaagaggagcaggacggggaggaggcatcgagacaatagaatacaataggcgttctctgcctccccctctgccactcaggcaagtcaggcgtggctgcccctttccaaggtggcagccacaaactcagttctgatccttatgttcttctaaagcaaattccccttagcatatgtacattgaatcaccagattaaaatattgctacctggctttcacccccagagattctgatttaattgatctggggtaccaagtagacttctggatttttaaagccccctgagcaattctaatgtggaataaaattagggaaccactgcattattggccagataattcctaggtcccatgccccacccgccctcaaatagagcttgccacaggctccactttaagagggcaagggcaaacccatcacccttttgtaacagtagaaatttgggggcaaattcagacccatccaacatttattgagcacctactacttgccatgccctggattcgtgcctccctatgtattatctggcttagccagcagggagcttctaagagggtacccttctaaaggcaaagcgctgtcttgaggtgtaaatacaaactgtctggtctttatgttctgtggctttctaattcatagatgttcctcggacaaaggatgtttcacaggtgccaagagaggatggttttaaaaggccagaggtcatgaggcaagtgttggaagaggcaaagatctgaggggctctgatttggcttcaggacctttcattagagcatcagtaattcttagagtccagaatctttccaggtgtggcttctttggacagagccatctcttggtatcggagggaagcaaatggctgctagtggagggaacagagccctgtccttggctgcataggcacagggaagcagaacagcggatcgggcttctggaagccttgttctgaggcaactcctttgctaccaatttgtttggggactttagacaaaccacccgcttctctgggcctcagtttcctcatctgtaagatgagagggttgcttagatagatgcttaaaagaaatagtaattggtcttgtctcacgatgttgttccacatcacaataatgattttctctactttgtgctgtgtagcataaatggttatcatcaattctattctcatgtagggtaactgaagccattctcctccatctgtattcctggccaaagtaataaatggcagggaaaccacatgttttgagcaaccaatcaagtatgtatttctcaaggacatgcccttagtttactcatttctctattcatttagaaacatgtaatgtatgctacacagccaggcagtgtgctaaagacaggaatacagtgattagcaagacagtcaccaccatgtagaacttagggtgaatagagccaaaagaaagagtgggagacccaggggaggatggaggggtgactaggagttaaccagatgaacaaagaaggatgatatcagatgagatggactgtattctaggaaggtccaagttgttagagtaatggtcccaacttactgggattttatacacatacaaactcaaaatttaagctatatactgagcagaagacttgtttattttcaggcaataaatgtttatattctcgggatctggagaatagccaaagactaaaaaataggcctagaggaaggggccttcatgtttcatgtgtgaagcacagtaatgatgaacagcaaagctttagagatgtcagacttcctaggctgccaacacttcttctagtctatgaactaccttaaatgagaacagaggttaggtattatttcactctggatgcccagagcctaatacagaacctgacacataggaattgtccacttaatgttgcttgattgtctgactggtttgttggttaactggttggttcattggatggatggatggatggatggatggatggatggatggatggatggatggatggaaggaagagagaggatgcaaagtgcctacagcagtgtctcatacatacatataataaattgtaactgtatatttctgtcataaaaaataccttttttgtcatatacactgaaacatttgtgtctataaattcccattcatttaacctattttaatattgtacttggaacagtgtttttctcataatagaaaaaatatagtcattgtttcacacgcattttgtttgtgcaggaagccaaaatacaaatgcattctgcgtaaaacttagtgtcatatataacactgctgagcattaattcttttttaaaaacttgatgagtttgcataaacctgaacaaacatatgtgcttggtcctcaaggacattagctttttcacttcaggagtggaaagggctgctatagaccatatcaccaaaacctgctttggacactattgctgaatgacaagccgcctcaaagcttagtagtataaaatatccattgtcttacggttgcatgttctgttgggtcagaaattagaacagagtacagcagggatggcttgcttctgcttcatcctgtctgaggcttcatctgagaagactcaaagtcttgaggggaactcaacatctgggggctggaatcattgggcatctccttcattcacacatttggcacctgagctgggaagactctcacacactgatgttagctagattgtcaatcagagtgcctgcatgaggcctctccatgcagcttatgcttcccccaaacatggcagccttgggatagttgaactttttgcataacagctcatggctccaatgcaaagatgccagtggacaaggaagaagcttcattgccttttatgacccagcctcaggcatcacatagcatttcctccatcatattctttttttttaaattattatactttaagttttagggtatatgtgcacaacgtgcaggtttgttacatatgtatacatgtgccatgttggtgtgctgcacccaataactcgtcatttagcattaggtatatctcctaatgccatccctcccccctccccccaccccacattagttgaagtaagttacaagtttatccgggttcccaaggaagagacctacctccccactccaccttgaacagaggaatgtaaaagagttttacagccatttagaaaaccccgcatccccagtttttagaaactgagccctagaattccaacacaaggaaatctcaccttatttcattgccctttgagcatcattttcattaatacctagcatttctttttgtgagggaagaaccaggtccccagcctcccaatacacctagaatgtgctggcaacattgtggcaagaagatgcttccttctttttctgaatttaatgcttctcttggattatgccaattttgagaggaacccttggctaccagctaaaccagcggcagtgaactttcctaatggagcaacagagcccatgtaaggaaaccagggcaaagcagttgaccacagagtaaccacctgcaaccacacaagtatgcccaaagcagtgatagccaccatgcttccacccaccccacagacactctttctccttagggtctcggcttttgtgcttttaccagagcgcaacagttttctggaagtgctcagggctatgggtaaaagggcagtttcctgtggactcagattgtttaagatgtcatttgggggtaaaggactgtttaaagagatggtttcttatccatcagatggctttagaaaataaggtgggtggatattaacactttgggtgagggcctggaaatcttgggactttagactctctggcaccagggagttaaacaggtcacaatgtggaatgctgggattcagatgacaccctgggctctgactagcaagacatcatagcagctctgaggggcccacaagaactagagatgtgtccaagctctgctggtgtatagatgtggaactgagtgcccagcagtggtgcctcctgccctgcctgcctgcctggcaccgacatggctgaattgtaccttatgccatcgggtgtggccagtaatcctgtgcttactttgactggcattgccccctccactggccctgaatgactcacctcatagaagaaaaaggatacataacaaccttttccactccccacagtgtcacccaggacttgttgacaggaccaacaccagtcttcttatgtgtgcattgttcagggtacagcaggatggctagctaagcttatttaaagcatagttacgattaatcataatcatagctgacctttattgagcccttattttgttttgggcactagaaactatgtgtattgcctgtttcaatcaacacaacaatcctgaggtatcaagtattagtttcccggacattagtactggtaggtattcattggccttgcaaatagtttggaaaatgctggttgttctaaaacagtgacatgcctgtaatcctccaagaaagtgatatatgttgactttttgaattgtatttaatcaccgagcaactaatattttaaggaacatgaatttgaaacctgactggatgatatagaagtgggtctgcgtaaaggttgataggtgcagcaaaccaccatggcacacgtttacctatgtcacaaacctgcacattctgcacacgtatcctggagcttattttaaaaaagtggattttcataaaatatgcttagtgtcctatgagtagtctaagaaccattggaactaggtgtagtctaaagcatcagggttggatttggtgtgactgcctttgaaaatggctactcatgatacacccaggttggccaggtgactcctgaatgtagctgatggtttgtgcttagaaatgtgtcctctgcttcataactctcaaagaagcctgctgcatcacaggaacagggagctccatctgcttccagcacccagttacatgtgcaaggtgaggaagctgaatgtgaaggttttgagcccatggagacgttcacaggctgccctgctgttgtttcccacattctccaggagtatgggaggctctttcctgagtgcaatgccagatggagcccaggatcaaagccgccagccgtgttttcatccccagaaccaatctaagctacaacctaatccttcattctgtttgtttttataaattcacatcctaaaacacatccccttcttgccttttttccttctgatatcatcagaatatttcaggacacagcctgcatttacacatctttcatgcaacttcatgtttattctgccaagtgcctctgaagaactgccatttgtgattaaaatccttccagcttcatcttagctttctagtgattctgatcaaattaaaatgattttatgtttaggaattgtggcaggtcagagagggatttcttattgtattaaatgaaggaaatgtagtcttagctaaactcaaatgtcaacaccttcttaagattatgctttactttgaaaacatcatctgcataatcatgaaagtttattcattaaattacacatgcacacacctatataaaatggtgccagctgtagatctgagcaatatccaacttacaacttaagttgcacttttcatcctctgaggaacctgctattacaatacacatctcacattgaggaaatgaggcacaaagaggttaaataacttggcacaaggtcacccagttatgaagggtggaagcaggaatgttaacctggacagcttacttagctccagagtcttcctaacaagaaattcttagcaaacaaaaacttgtcaccatttttagagttaattgccatttctatgaccacaggtttgataagcacactgcatttccaactcaaattgcacatggccaattacagtgccgacttcttacacaactcttcaggagatggctggaaaccttccattattgataaaaaattttaaatggagccatgttattataagactgaagtaaacaaaaattaaactagaaaacttttgggttatgtaaaatggaagctcctccattccaaaccattattgaaatattacaggccgagcgcagtggctcacgcctgtgatcccagcactttgggaggctcaggtgggcagatcacttgaggtcaagagttcgagaccagcctggccaacatggtgaaaccccgtctctattaaaaatatgaaaattagcaaggtgttgggggtgcacctgtatcccagccactcaggaggctgaggcacaagaatcgcttgaaccccagaggcagaggttgcagtaagccaagtttgcgccactgcactccagcctgggagacagagtgaaattgtcaaaataaagagagaaagagagagaggaagagaggaaggaaggaaggaaggaaagaaagattggttaccaaagctaaaattatcatagctatactctacatattgagacgtaattttctgggtgtagataaatttatttggagcgaatctatgttatatgaacatgataatattcattattcttttatcccctggcctttcaaataataatatatatgattagagcagcatgatacagtatttttactttaaaacttttagttctcttggctaaagatgaaaatttcttcagggatttaacctaaatcatgtttgtacatgtcatagtgatctctcttgcattttggaatgattttcatttctatcaatagaggccctaaaatggctcagtttaagtcccacagaaagtgaatccttccttaatacctgctagattaagaattttcatttccaataaagttacttaaccacttgttttgcacatctgagagtttctgcaaatgtatcccagctgtgagatctagatcacaaaagactctgatactttagatctattcagtttctagttttgtttgaaacttgcctaattttttccctaagggaaacattttctcctagttcaaatacaaaacaaaactgggaaaaaatattttgtttttctgtggcaaagtttttctttttttctcataccatttataaatgtaatataattaaagaagttttaaaagataaaaaaaggtagacattggtctgtttccttacaatgattttctatgcactgggattttttaaatatacctgtaagcatagtatagttatcattttgtattctacatttttttatgaagcatattaaagccatattattgtacactcttcacaagcatcatttttattgttgcatgagtgtcatatgtacgtagctatttcctgatgttagagcgtgcacaatatattccatttttcacattagaaatcatgttgctataaaccatctccttaggatagattcttagaaattgagttactgaatcttaaaggatattaatattttgaaactctttatccacatggccaaattacttcctaagatgattttaacagagtacactgtctggcaatttcctgcctgtgtttgatatgcgtgtttgtgtgtagcgggtggggtagggcatgttgtttaacttgtgcaatgtgggagagcatggatatggatcagatctgttgttgcataggggaaagagcttggttcaagctagttcaaggacctgactttttgtcctgactctacaactaactggctgtgagaacctgggcaaatcagcaggaggtttgcagacacacgcatttatccataaacctttgctaagtgctttttatgtttcttggtaccaaagagattagaaaatgaagtccagggttcttaggatattacactctagtgggggacagataagtggaggcagaatcacatgaagtttaagagaatgaactctggaagtagcttgctctgggttcaattcctagttattagctgtgcaagcttgcatagtgagaagtctcttaagctcagcttcctcatatctgaaatgagggtaataataccagtggcataggatggttgtgcagataaatgagaaaatggttaacctgcctggcacaacgtgagctcaataattgttaggttttttctttttttctgttttgttgctgatacgattctaataagatttagaaactaccactatgttttaagtggtagggagcatgtgtgctgcttcttcacaaaagaatatcatgtctttgcagcatgggtcttgggttctgagaattgataacatgtcggggagtaggagcaggtataggtcattataggtcatatctcaggggattttcagctccaatgggccgccatgacatcttcacagaaaccaaacggacccgcccccccccccccccgcccgactacccaaaattttgtttggtgttgagattgatgatgccatacttccaccaaaaggatgtacaaagttttattgttcacatgatgtgactttctgggggaagcaggactgacccccaggcaggtccataaaatggcttgagagagctgggactggctcagcgttctgtggtggttaggaggcggagctgggtaagtgttctcatgccagcaggggttgcatggtttgaacttccaccaacaccaagggagggagtgcactggccttgttcttgacttgcaatcagtaagcagtcaaacaataaaaatggagtcagactctttattatgtggggtgtggttttatgatggacaagggaaatctcagtagctttctttctttcttaaaaggagaaacaagccaactctctggatcccacctgttcctactctttttactgcagtgcttggctccccggtactcccagcactggctgtacagtagtctctgatccaagtgctcttctcccattcttaaaacacgtgcaatcagattcccccgactgctgctggaaactgctcctgtcaagatgatcacttactttcatattgctaacccctgtggtcctttctcactccccatcatacctatcctgtgagcgttagctttccttgtctttctttgtgactagttctcaattttctgaccccttaatgattggagtgtcccagaacctagtcctggggtctctgctcttctctatctgcactaactctcttcctctaaaatccatctacccataagtagatttctggcatctgtctcttcaggaacctcaggcttgtaagtccaactgcctcaatgttcctatacccaaaatggagcagctggccttctctttcactcttgctcctcctggagtcttcttcatctcatttaatggaaacttcatctgtctagctgctcgtgcccaaaactgcaccattacctggaattctttctttcatgtgcacttcacatccaacctgtcagctaatcctgtagactttaccttgaaacaatatccagattctggccattccttatcacctccactgctcccaccctcatccaagccactgtctatcctttagctgaatttctgccatagcctttagctgatgttcctgcatgtactttagcccccctacagtcatcaacacagcaggcagagcaatgcttttgtaaagtcattcagatgataccacagctctgttcagtactctgcagtggctgctcacgtcactcagagtgaaagtgggagtcccattccttcccagaaggccctaggtcccttacctcaccttctagcacctaccactctagctgttcctgatctttgctatttctggagcctaccatgcttgctcctatttcatggccttgcatgtgctgtaccctctgcctggaatgttcttcctccagatgtcagcatggctcacctatcacctccggcccgtatttgcccaaatttccaaatgtcaccttctcatgagaccttttctgaccaccttgatttaagttgtaacctccctctcacttcctatccttgttcttgctttgtttttcttcatggttcccaacactttttaaaagaatatacaatgtacttcttagttttgtttgttgtctactctcttagagtggttgttccctgttctatctcactggcctaatacagtgcctgataaataatagatgctcaataattatttgctgaaataaggaaggaagagagaaaggaaggaagcaaggaaagaagggagggagggtaagagggagagaaggaaggaaggagctatgtttgcaacatatccaagaataattgtattgcattaaaacagagcataggccaaattgcatgtggtcatttcagactgaactgtgttcccctggaatatttacacttgttcattagcatgacagtctcttttccagagcagggagtggcttgagaggtgtctgcatcaatcacacacactctgacattccatttgggaagggacaacacagtcctacgcttggtagagctagtcttcccaaacacaaatacaaggaccaattgtagattttggaaatcccagccaccactcacacaggagaccagaaataaacttagattatctttggaatgtgtcaacatccatgtttcaggactactgcattcttaaatatccccaagaactatattgagcagtatcagctgcacagctgtgagtggcgccaaggactattttgtttgggtgattgttcactgtaaaaagcacagtagggattggagatatttttatttgtgaaattttgaaaacctgtttcataggtatcttggttgtttttaacatggggcagttcacatggagaaaacaaccggttaatttgatttttttttctgtagataaaggtgcaccttactccaacttctgaccacagaacctggtaaaggagtagctggaggctatgtttggtacattctgtagtgctgctttgcaaattgccataatttggacaagaaagtagtggacaagaaaatgcaatttgacaaatgtctggcctttcgcagggatttcccaggctcccctgagtgagcggagcttgagaaagacacccaacatcaatattgcagtttgatgccataagctagaaattgagtgtcttgacttttgtaggaaaacccacatgtcagtcatttggggcacttacttctttggccagaagtggggagttgcgtcatatatcagcaaggaaaatacagagaaaagcaaatgaatatggaatatgagaagaaagtcatctagggcaagaaggaagatagtagctgggaacttcgtaatagctgcttctcccttaggttttacactatttacttggatcttagttttacaaaagttttaaggagtttgatttaacaaatgttccattctctcaagaataaccctaccatactttctaaagtttagcatttgagaaattggactaagacttttaaagttcgtatttaaggaaatggattactctgatggtaaaacatgttgttgttaatattgactctctcaaaaactgcatacaaaacaaaacaaaaaagcaaataataacaatgacgtgttgaaatgcgcgagatccttaatgcaacacaaagtcttcctctatgaggtggagtatcttttatttctatatctaaaaagtctgtgagaaacatcagaaattagccacaatttttgacatcagtctcagcagaacagctggtggtatcatgtgggaaggacagcaactgtagcattgcacgatcagccaacccaggaagcatcaggttatttatttgctgctaaacaaggtactttggtccatttcagcgcacatacaggcctttcaggttgggtgaacggtgactgttttgaatgaggcaaaattgtattctaggaggggcagtaagactgttccttcggcacttctgtgtgtctctcacatcgagagtcgccatctgtccctggagaataatcggcgtggcagctgggcatggtgtgtcatcagagacaaggaaccttgtctcagatcagaaggcagcaggtttggaggtcagcagcagttttaggactgagccaggttaatcgttgacacctgatgcttaaatggcctcaaataaaaccaggactatacagcttgaactagcccaattgcaggaaagacggcaggtcccaccctgatctttctcatttctttggcgccatggcaatgtgtttgcgtttagttatatgtctttgttgtcttcctcctctttcaggactgaaaaccataaacaaagaatataacaaacagggcaattcttaggaaaggcaaggatgattcatttggcagtatgcaagagggttcaaagtacataggatcaagcaggctgggttgataaaagataaccacccctttgattatcattcggcaattggagcttatttcacttagcatttctagttttttctcttcccaaaaggaatagagaaccagctccacaatgccatagcaaaaaaccagagtggacatcaccgcacctccttatccaccagtcccctcaaaatccccatagaagcttttcaaaacaaaatacacacacacacacacacacacacacgcacacacacacattagacacagaaataggtagtaggcatacccttagtataccaccaaccaacattaaaagtattttagtgtgacccacagagcgtgaaaacaaaggaaagtgtagatttcccacaccatccagggctgtacgaatggctgcagcattttgctgcgtgttcctggatctgggcaggatttaacattttgtggctttggggaaataacgggacacccagggtcatcacccaacaccagtaccccagacatatgttcagggaatgagccaatgggccaagggaaaaaaaaagagcatgctaactcttcataaaagtcgaaatcatttctgatggaaggaaaggaagacagagagctgctgaaaaatgggcatgttttttttttcctgcaacagaactgtcctgaatgtcaagccaatgttggcatcatggtagtcaccagagaagagttaatagaactcttcttttataggtaggttaaaaataatttttctgctttagatgtttgtaaaattcctctaggaacagagaggaggaatgagtctttgtgtcagtgggctgtgggcagccagcacccccagtctgccacacatgtggtgccagggatttccatggaaagaacctcaggagacctgattctgggcctgtttcataaggctagcaggctagtgagggccctaggtcataattttaaaatcatactaatatacatccaggtgtgtgtatacattctcagggtagcaggaagaaagtggtggcaagcgaggctggaaaggtggcaggggccagaccccacaagcccctgcagggcatggtatggatttttgcctttgccttaaatcgtctttggaggttttaagtggcatgatgggaggtgggtgtggggtgagcatgagcagaaacatgatcatattttgtgtttgaaacaacgttaattcctttggaggggatttagtcaatagcactgactacgttcatactttcatcttttctggcaatccccttgaactgaagcacttgagattagtgtggtcagtctcaattctaagagcacattacaatcccctggaggatttttacagcccagcccccatctccagaaatttggatttaattgggcagaggtagagcttgagcatggggtgtttgtgtgtgtgtgtttgtgtttttttttttttgtgtgtgtgtgtgtgtgtgtgtgttctaattatcaggcaaggctgcgacccacaggttcagtggaaagataaaattggagtcctcaaagtgtggccccgagacgagcaacatcaccatcacctgtgtaccgatcagaaatgcagattctctggcctgatctcatactgactgaaccagaaactctggggctccatatgttttaagaagccctccgggggttctgatgcctgcaggtataaggcaggagaagctggagtctggatctgcttccagatttagttgtagaatagctctttgataagaggtaattgtggaacctctctggcccttggtctcttcccctgtaaaaggtggaggagggattagacaatctcaatggttaagaatttatcatccatgcacactaaatctaataagagttttataatatactttaaaaatcatttttatataatggaataagaacatagtcattgtaggaaactcaaaaaaaaatgcaaagaatatagaagaaaataaatgtcaattaaaatttttccacccagaagtaactgttgcttatcttcagcagtttgagtgaatgtattttgaatatattttggtgtgttttcttctgatattttctgtgcatacctacttacaaatctgggaattatactatacatggctcaggagcctacttctcacctaacattataccagaggcaaatcttctcatcattaaatgttcttttaattgtctttgttaatgtctacataataccctattacattttatgccataatttatttaacttttcccctatattgactgtttaggctttttcacatttcttgatattgttttgatgaatatctgtatctctatatctatccatctatctagatcttagtctgaagaccttttcaagagaatcctagaaatagaataattggatcaatgcacatgaacttttcccggcttttgatccatctccaactttttttttccagacacaggccagttcacacaaacaccagtgggatattaaagaactctcctcaccacaccctcatcatcattcgtaatattgattttcatttcatgcactgccatgaagcagagaaggctgcaacagcaggacagtgtttggaataggagtatagctcgggcagtcaacacctaaggaagattcagactcaataaacagaactgtagagctatcagcagcacagacactgtggttggaatacagggagacatacaggaccaatgatgacattttcaaagagccctccttaaaatgtagcactggaatttacttgaagtttgtggaaaggttgtggattggtggcaaatcaccttctctagaaattggtactgataaagcacaatgttgtgctccctagaagctgagaggtggtcctgactgaagccaggtggaggaggagccattgcttagatgaacctctaaggtcccttctgggcttatgatgctaggttattagagccagtgtagtgagaggggtatttgtctttcttctaccattcctttcctgggcactttgtatgtccacagacacccaaaagggctccattttcccaggtcttcctgcccattgacccaccctttcctccttgtctatatctgacaacctctcattgccttctcgttacttgattccttcttggatccaggatcctaattgtagagagaaagaagaacagtgagagggcttagaaaatagaatcccaacctttattcatcaaaaaaagaagaaaaaaaagaagtggtgagcttatgtcaccatttatttatagccccacctacttccagaagtatcttaagtggtacctgctttcacagtgggctcagggagaactaaagtctcctatttaaaaaccagttcagggaacaccagacctgctagtcgttgacagactataatggggaagagagtaattcaagcattcaaccactgcatattttttaatgtaagtattatggggatgagagactgtttaaacaatatttaaaagcatagatttagtgtatacccaaaagaattgaaaacaagcgttcaaacaaaacttgtatgaggatattcttagtagcatggttcacaattagccaaaaggtgaaaacagtctaaatgtccatcaactgataaatggaaatgaagtgtggtatatccatacaatggattgttattcagcaacaaaaaggaatgaagtactgatacatgccacagcataaatgcaccttgaaacatgctaagtgaaatatctaaagaaaaaagaagcagccagatatcaaaacccatatattgtacgattccctttatacaaaatatccagaataggcaaattcatagagacagaaagcagattggtgtttgccagaggttgggaggagaagagaatgagcagtggtactgatgggtacagggtttcattttggggtgatgaaatattctggaactaggtagtggtgattgttgcagaacattgtaaatgcattaaatgccattggattttacatttttaaatggttaaaatggtaaattttatgttaagtgtagtagaaggaaagacacttgttcttcagggctttgaggaaagataggctcagttagttgtgcctatattctaccacttaccagctatgtggccatgggcaagtcacttaaactctcagcttccatttccttatctgtaaaataagggtaattataacagtacctacctcgtagggttttaaatcttaaatgagtcaaaatatgcaaagtgggccgggtgccatggctcacacttgtaatcctagcactttgggagaacaaggtgggtggatcacctgaggtcaggagtttgaaaccagcctggccaacatggtgaaaccccatctctactaaaaatacaaaaatttgccaggcacagtggcacgtgcctatagtcccaggtacttgggagtctgacgcaagagaatcacttgaacccgggaggcagaggttgcagtgagccgagatcgcgccattgcactccagcctggatgacagagcgagagtccgtctcaaaaaaaaaaccaccaataaaaattaaaaaaaaaaaatacacatatatatgcaaagcgctgagtataacacttggcacatagtaagcatgatataaatattaatatttgtgttattaatttagcccagtattctcaactggagacagcgttgcttcccagggaatatttggccatgtctggagacattttttattacatacttagggggaggggctctactggcatctagtgaatacaggcaaagaatgccactgaacatcctgcaacgtacaggacagcctcccacaacaaaagattatctggcccaaaagaccattcgttccagtgagaatccctggttcaaacagagcatgtagggaaatgtgcttcatctcatgaatgtatatattaaaataggtcaggtagaaattttcattagaagaagacggtcagcaaatgtattaaatgtcccttgtgtatagagaacactatattagacattacggagcatataaaataaggcaaggagctgtccttgaggagctgagataaaaaagagctctgtgtgatggggttatttcagagagaagttttcgccaagagattactgtaatcagttttcccttaataagagggtgatctgaggtcacccacactgctcccagtaatgctcgctcaaaggctaacacttctagtcccctgtaaagaagcatcctaagggaatagtgttggttccttcacttgtctgaatgtgtcttgtgtttgggtaaattctattgaatcaatagctgaaaaagaaatcactgtcacaaatggaaataaaaattacttgttatacatacaagcacagacatgaaaaaatattaaatctcattgtattcaaccatccatagaccaaaaggaggagattcttttggccactttccatgtaaatagttatttgatcagattctaaaaatggtatattcatgtcattagtccagtccacatcacagaatttgcccttacacaaatggctcaccatcaaaaggtctctctcgctttgctagcagtgaaggttgggaaaggaccctttttgcttctctccatctttttacctgtagactaaggatgggaagccctgcaaaggtatgccaagccttcacttaacgcctgccataacagttgtccttcagaatgggacagtgggaagaagggccaaggggcctggtgaagcccattaagagagtagacccctggagggaaccttgtctttggaagctgaggcagtggatgggtggtcacaggagggactggagaccccgcaccatgcagtcctctttgcacaccttcttccacaaccctggcttcctatatgtacatgtgctttctagcaacttatatttattcagtgtctactgtggcaaggactcttattagacacttttgtagggggaaacaaaagcaaattaagcatagagcatgtcacagtgagttctcagtgtggcagggataagagctgttatagtcactataatacaagacagaaagtgacaagtgcaatcagaaaaatgtggataaaacactatgggatttcagaggacacagttggccttcagtggggagtctggggaagtccttttggaaagggtagcattagaatcagaatgtaaatgttggtgaaaatgtagatatgttgaaaggatgctagaatattctaaagaacagagcaagctaccaaggttagcagttaagtatgtcacagaagagatgttgtaggatttgtggaggggagtgtagggaaataggatgagctgggtacattaggatcagctcatgaaaaaccagcaatgccaggacacagttaagctatggagaagcatgggtggattaggaagattgttgtagagcgatgtgtaaggtggactggagagataacaagggtctgagttatgtggggaaagaaaggtagggagaggccagactcaaccagtatctgagataaagcatttgtcaggactgatggcaggatgaggcagcacatgggtgtaccgaggcagcaggacacagtgttgaggagcatgggcgctggacacagatgctttgtgttctagccctggttctgccacttaaactaggctgcatgtccttgggcaaattgctttacctctcagtgccttgctctcttcatccaaaagaatcgggaataaaaatcttgctcctcacacccatatgctgcagattaaatgagttaagtgcctttgacacattctaacgtcctctgacacagcgtaaattattgtgctcaatagcttaacgtaaaaattgggtgttattattgaaggtcatgagaggatgaaatgggaggatgaacttttgaaccaagttaaaatcatggtgtttaccaggaataaagaattacacatgggaaggagtgatctttggttactcttcacaaggctgcttggagggactgcagcatggggcccttgtttgagtagaggacaggactgcccatctacataaaggcccagttatctagatcttgttttctagttcctaaagcattaattttactgtctggcattagctgcattaatcttcaccaatgagtcaggagtactcccaagacatcaggatttccctgcttcttttcatggggagacctaggatcaaagaattagggtcatgggagaccatcaaacagatgatgcttttaagaggaaggaggccattttcataggcttgggcactaacagaatgaacactgaagatgttttatttaaaagaaaagcaattatgatgttttgattttaggtaaggaatattgtcttgtctgtgtgggtttgagcagagtttgttcgtgcaggaaggacaggagagaccggggagtgtcctgaggcaagacatcctgcctcttattctgcaactttgcagaactcagagtggaaaagctttgctctcctctgatatcccatttggtgctcagactgttccaatgtaatgcatgcataagaataaaaattaagctttcaagtgctaaggcagatttttaataaagagacataggctttacccctataagattaaacagtcatcagggtttaaaggtttaatctgttggagctcagcccaggatggggttcagagccccagattaattggatgcagcctcagactttgaacgtcagagctggctggggggtgtgtgcgctggtgtgtttgagtgtgaaatgtgctaataaggaggagagacctctcctttgcaatgtgctgcggcaggagaaagcaggctgccggcccctgcctccctgaatcctcagtggctgactggataccgcttctgggggttgctgtgcacatgaatgtttgctattgttccaggcgcacgtcggccttaagaaatagcacaaaacaggcccatccttattcagaagccgggccccctccatcactcaaactgggcctttcaggtcacatgccggaggctgctgcagacaggacccagctgcctcaaatctgccgcctaacataagctgcggttcgaaaatcctgacagcacagggcttcctgggctctgcagagcaaactggaaagagctgggatccaggcactatgttctctgaagaactgtggctggaaaatgagaaaaagtgtgctgtggttcggaagtctaagcagggcaggaaacgccaagaactgctggccgtagccttcggggtgaaggtgggtgtcaaaggcggctttctttggccccctctcaaactctttgcctgttcacagatctcctccctggttcgaagggctgccctcacacacaacgacaaccacttcaattatgagaagacacacaactttaaggtaagcaagcctctgcattccttcttctgttacaaaagggcaggtggaaaggtacagtgtatagtttccgtctggtttctgactgtaaagtcaagagacaatgaattcctttgctttccacatttagctataagcttaacacctgcgctttctgtcagttcaaactggagacctcagaaagcagtctgctcagtgcttatgcctggaaacaccttatctggatgttgacttagttttggagaattgggcccattgccacttcacgttcccatgtccagtgaaataaacacagagcatgcccagtctctctcagtcagagatgttctgctgagagctgagcagtacttttccactcagtaaagaatattgctgtctccgagcaagggaaaacagttgcctgtttctcgttttgtgttttgtcttttgttttcagtgatgctaactcctttcctttatgcgtagacacctgtgaaatcaaataatgacaggagatgccatccagaagcttttatttgtgctccgggtacggctagcagggggggcacccttggtcacagcctttatcctgctcaccagaccaaacaaaaagatctggaaacctggtgaggggttaagtggaatttcccaagtgaatttataaactggaaagaccgctatgttcgtttcagactggtacttgtagaaggggcctgccatcagaaaattatggcctgtttcctttgcccaagtgttttccaagaagggctggaaagggatgctgctgccaaattgtctagcttgaattgcagttgagaggaggagagacaggttagagttagaggcttcaccccaaaaagtgagctggcagtttgaaagttggggagagtggagatggaggatccaggaagaaaacaataggcaggagaagcaaaatgtgaattgctttcttttaaaaaaattcttgtttcctttagggtcagtaacccaagtgactcttggaattagataacccttttgtcagaggtgacgagggaaactgattttattctgttgctttccgatcctttctgaggacaaatattcatctattaaatatacattggtgttagtttggtctgtttccctgcatctgtttttagaaagccagcagctcaggcatttgcatgctataattgaactgaggaatggaattatacagccctacatacttagcattagggtgaagaattgcattgcataggtcctcttctatgccaaagcttttcatatttctcccgtcactgaatattgacaggtctaatttggagcattaaatgcctcccgtttttttttttttttttactctgttttccatttttatcctcattaattttttttggccttaagaaagtgtttttttgatttttagcagaaatccttgatttttttgcatcctgtggatacactactagtgatgagaggatggatcttcatggacttgtaaattctttttcttcctcttgaaaattccaattcatttggcgttaagaaattggaattatgccatactataatatgtttgcatggagtagcttgtccatgtatattctgtgtctgagcttgtgttaaaaacacacaaatatacatagttgatattttcaaaactaatttcagtccttttaatgttagatccctgaatggaaaattaatcttaagacattttaaaactaaaagataattaaatcttattttttaagtagtactgttgctaacacaatatattacttatcactggaaaacaccagcagctcttctaatatttgtttaaaaactcaaaagctattcaccgttaacagctcttgaaagaagaaaaggcacaaaatagagaagctgttcaagaggagtacacaagccagacaggagcgtttctcttccatgttttaaacagacatctttgaaacttagcagacctcaagtagctgtgacagttgattgtggcattcgatggtactgttggtgccactgtccttaagaatgagtggcaggggccagatgaggcatcccctttgtccttccttgccctttccaccctcaatctccccactcctcacccgcaactaactctaggtggaaactttacatggtttttggaagaacattcaaaaagcaggctcaggctataaatacagtggcaggtttttagggacaagccactgaactgaactaaaggaagaaaattcttatcctaggtccctgccatctgcttggaatttgtgtttcagaccttaattttacattagctttttatttacattaacttctaatgggctttattcagaagccttcttgatttgtaattcgggttaatatttgaggctactatgtgcatagcatatagtaagcagtcaataaaaagaacaaataatcacattttcatgctcatcagataataggctttgctaggtgctgtctgcacttttttcttttttttttttttttttttttttttttttttttttttttttgagacggagtctcgctgtgtctcccaggttggagtgcagtggcgcgatctcggctcactgcaagctccgcctcccgggttcatgccattctcctgcctcagcctcccaagtagctgggactacaggcgcccgccaacacacccggctaattttttgtatttttagtagaaacggggtttcaccgtgttagccaagatggtctcgatctcctgacctcgtgatccgcccgtctcggcctcccaaagtgctaggattacaggcgtgagccaccgcgcccggcctgcacttttttctagaggcctcctacctgacattcaaatttgccagtagagtttctcttcttaccccataacaagattgtttgccccagtcagaactattaccccaggtaaaaagccctttcctttgctctgcccaggaactttgtcaagaggaatgaatagaaacccccaacattccctaagttgggaccttgcgctctattctctcagaaagctcacagtcactgcctttgcttctcaaacaaagcttgtctaagcaaagtaaaattcggctctgagaacaaaagctttgggaaccaaaggacagttggcacctcatcgcatgcaataattgtatacttttcaacactgtgtgctgatgcaatctttgcttatttaaagcctggatttcctagggttacttgtacctactaggcactgagacgtatttgttggaggaatggtgaaattaacagactcctctctaaaatgaaaactgtttgtcaagagaaaaaccactcggttatttagctcattttataactgcatctctgtttatctagttgatttaaggaggcactctgctgtaactggaacagctctcttttgaatggtccaccctaataataccttatggctgagctctgaaaatcttcaggccagccaaccccagaggcccggcagtcggcttgctcggcttcctgcccacacttagcacagtgctgaggtagctttagcccgcatagtactcctggccacaccatgttcttccaaagagctcagctctctctgcctcagttccctcatctataaaatgggagtgttgggaggtttaaagaatacatgcgagtcacttatcgtggtctctggcacccagtaagtattcatttgatgttagcatctattattatctttttgtgcctctcacttgtatttttgtatctagctttttcagtcttttattttctaccctctcttcttcatggctttttttcttttgtctcttttctaccatctctttcttcttctctcattaattatatgtaagagaaaatgaaataaagcctgatggttatttccttgaatgtattccatcctgtagccaatactggtttatacccctcgtttgtttaaaaagtaaatggatgacttagatgatttagatttagatttcacacatttttctcctagcttttaaaaagtactttctattaaagctgtcataacaaatgaccacaaacttggtggcttaaaacaacacagatttatttgctggtggttttgaaggctgggaagtctgaaatcaaggtatgggcagggttgggtccttctggaggctctgaaagagaaactgccctgcagctctctcctagcttcttgtggttgcggcagtccttggcgttctttgtcttgtagacacaccactccaatctctgcctccatcttcatatagccttctctgtatgtctctgtatatctgtcatcttcttataaggttgccagccatgggatttagggcccatactaatccagtatgatgtcgtcttaattatatcttcaaagaccctatttccaaataaggtcatatgcacagtgacccagggttaggagtgaagcacacctttcgggggatatacgatgcaacccgttataggaactgtaattgacattttcaggaaccctcaataggaaggatctctagcctcaccctaaaggatgcattgtcagtaatgttaaagtttacagtttcattaaagatttttatgtccatgaaaaaaggtctttagatgtaatctaattgctcctaagtgtcaaccccttggtccaggcataactgctgatttccatggctattgattttaacatctgtaaagaaaagttttcatggatttttcttatcagtgcttcattgctctgatagaaagtggtgaaacttagttattctttgtctcttatctttaccaagcatttcttcattaaaagaggcaccaaaaaaactttaaaatagctggtgagcttccatttttagtagcaagttgaaagtgtctatttgctgtagctggttcatattcagagtatgtgttatactttataatcaaatttatgatgtagctattagttcacactaatatgtgtgattgattatgcaggactgggcaggtaatgtgtgagacctagtataaaatgaaaatatgaggttcttgttaaaaaaaaaaattgagactttcaaaactatgacagcagcacattaaaccatgctaaggacagggctctgtgcaacagcgcaggtcacatgcgccctgaagctgaccctgtggtgatgtataaaaaaacaggagtaaaagacaagcttctgtgagcattcaaagaggagggggctccctagtgctggagatcctgtgtaagagacagtgtggttgttctctcagccttaaccaagaatcctcgtgggtaggtggaaagttggctgaagcccaagtagataaatagatcaaggatggttatacaggggaaagaaagagcacccgggctatgcaaacaacaggagtgagaacttggagtcagaaatgtgccaggagcgaataaggtgcaggggagagacctcggggacagaaaggagtccatcacatttaaatcatcagttggggtgggccagatggtggaaagatgatgattcctgggccctggagccatcagagtctcctgagcaggcccttcccccactcagcctgctgcttctgttcccagcctctccagtctgcatggggatctgcatcactctttcctgccaaattctctcccacccccatgcacttccaggatacccttccttcttcccgatatggaatatggatggagagcagaggcccagaaagttctaacccccctcactgtgtgttccccactccctttccaccccccttccacctcctgcccagcctgtaccagcttcccttttctccctagcgctgatcaccagctgacatcgtacatatttatgtgtgtgtttgcctgccttccccttaccagagggaaactcccgatgggagggggtggggagagagggttcgtggagtggggatttttgtctgttttattgactgcagaaaccccagtgtctagaacaagtcctggcccacaagctgttcattcacgttggcagaaagcaggggaccgtatctccctacagttgagctttcggagccctctcctcactccctgccctgcagtttgccctcttgtgcggcttgtgtgttgtatgcacctgtgttcattgtactagagtccttccacggagtgggcccttgccagggtcatcagatggcgcaggagagatggaggccctatcaggatgtgtcgggccagctctcaatccccatttgccagggatggtgactgtgcagtgctaccccgtgtctgatccatgggagcgggcgggtaagggggaggagggatctgtcccagttcactacagctgtcctgtgtggcgcctttcaaaagcatcccatcaggacgtaggggaaatggttgccctacttactcttatatgtcccccactctgctgacagactgaggatgcaccaggagcaccccgttcccatggcacaccccatcgcgtgtgctcttgtagcatgctccttctcaacatgcaacccccaccccgtgctatcctggaggccaggactagaagttcaagaagctaagaatatgtccccacgctcccactaaaacacctgtccaggacgtggcagcaccaccacctcccagtttggatttgaggctccttgatgatttctaggcctttcattcatttttgcattcttctcagtctagtggtcatttgctttggaagaagactttttgcttcccgcatgcaagcccctctctcttcctcttcccccttgacctcataaaagtgtgtcagcccttcgtgtcattcccagcattttgtctgccttgccttcttatcaagctcccaggtgtctatcacccttttctgtccatctgatgctacttctgtgcctggagaacagggatggctggatattgcacctgcaaattgacacaggcagaaattggcttcagaatggttgggggcttgttttgttttttttttgtttgtttgttttgttttgttttttaagttaataatcagaaaaggctgttttgccagaaacaagtctggaaagaaaattcaaaacaaaggcaaaactcatcaccttaaatataaaatgagggactcaaagtgagactggaataaacaggtttggaaatatatggctttattaaaaaaatgttgtttctgctcccagagtgctatgaagaggagttgtttttgtctacctcctaattcagcctgctccacattataatgattacaaagtccttgttttcaagtaatataacccctggaaactatcttaagctaaatagactattatacaggatggtctcataaagcctccagggaatactcagaactcagggacgggtggaaacaggaactgggagtatacctggagccagtttctccctctcttcctccttccctccctcctttcttctttttctccttctaactccctccctctttctctccccctccctccttcctttccctccctactttcattatctcttccttcctctgtctctccttctccctctccttcctccagaggcatccagtagaggccaggtgtgctactaaacgtccaggacaggccaccacaacaaagagttgtgcagccctaaatgccagtagtgctgagactgagaaacctcactactggcaatggggagccactcgaggtttttgagcagggaagtgtcaaaaggatgtgggtgtcgatgtgctcataaacctgatcaaagttaagtagcatgaggacatcttactttatgcagtggggagactcccagaaagctttgagacaatcaatattttagaaatgcaatcctatcttaaactagggcagctgctaatgagaagtccagggatctgtggtgcccggtttgagaaactcagctctcctgccccatctccttggccagcctttcagagggaactcagagtgtctgtcatagattgattcacctctgctgtgttttcgtacatctgaaaagggtcacttcaaggttaggacttcatctggtcttgcaaaaggggagagttcaaagtttaacctaatttttcatatgagatgaatgtcacatggttgtgggaaatacagtaaattataggaaaagtccttggcagagatctggaagccttgactgtgctgctgacctgggtgacgcaggataggctgcctgccctccagcctctcagttaaccctgggcaaacactagactagacctccagaacccagccacatgtagctggaagggactttagctctctcttctgtgaacataaagtagctaaacaaacaaacaaacaaacaaactgcctctgacccgaagattccttttcaaagcaaaagaataaaattctgatttttaatatgaataataaaatgacaaattgaggcaataaggtttccatctataccactgcttctcaataaaggaaacttcacccccccacctccccctgacccctgggggacatttgtcaatgcctacagatatttgtgatttgtcccagctgggagtgctactggcatttagtgggtggaggccagcgatgctgccaaacatcccacaatgtacgaggcagacccccacaacaaagaattttccagcccaaaatgttaatcagtagtgccgaggctaagaaatcatgatgtatactggtaagaaaaagcaaaaattctcaactgcagcatgtcataaacggtacttttccttcttacagtttcgatcccaggctgagctgatattaatacatctgggtggtgtctacattgacccatcaaaacatatctggtataaaaccaccagagaatactgccttccagattcagcagctatgagacaaataacatcctgttcatttagaaagagctgtgttgagagatacttgctaaatgcctgagatctttctggatgactcttcttgctcttgtttttgcaaagtagccattcctgggccatttgtcaaacataccttatctcgtgtaatatcatcttttttgtttggtgtggtttttgaattccaggcagaccgtgcctagtgtaatagtcttggacagacattcttcctgtctggagtattttcttcctgtctagaatattttagttactgccctcaagttttcaaactgttctttctctaaaaagatattcttgcaaatcagtgaacttcagaaaatggaaaaagccgaccagtgaattttaagatacggtatatttcaatgaaagagtagacataataagtagaagccaaataaaatgggctcagagcatgccctcagcatttacacgtagccttctgtctagagattgtccttgtggatccaaaagaaaattgaacaatatatcggtcgtgaaaataaacaatggcccatcaccaaaaaggaaagtaggcaatgggcctaaaataatgtttcactttacatccttgctctattctcattttgttttattttttggggactgtgtggggacactgggtgctacttgctcttcgagacgtctatgcatttatttggctggacagaacagatcaaaggcagtagggatacttgttgggaaaggatgttggtaaatatggacagtgataataagcattaaaatgcaatcctgatgtgctcaattatttttaaaaatattggcaaaaaaagtgaaattttagaaaatctgtgattagcctatcctgtttttcctgaaacaataggccagtttatattttgtcaatatgcattctgtccacgtgtagtaaacatgtagccactcacttaatttctaaatattgcattttcatttttaccccaagatatagggatatttaagatgaggttatttcatccactcaagatgtttcagagaccaacgtgatgtcattccttttttttttttttttgaaacaccatttgccagaaaagaatgcctttcaaaacctaagcccaccttcattggcctttggttatgctgttttctcttctgtaaatgtcttcctcaagtcatctgctctccagtcaacaccatcacttccccacctgctcaatctttcccaggctggtgaattcctatccatccttcaaagcccagttcaatatccccttccgcagacttctaggaagaatttattattctctccattatactaccataggatctcctacgtgttctgctgtatcacctgacacataattgcctgtttattcttgtagataatgagatccttgagtgcaggcagttcttattcctctgatctatttcaactttgtatatccaaggactagtacagggccaagttcaaagcaggcaatcagcatgtaaatatcaaacaaacgagtgaataatgagttgctggaaaggtggaaataagatgaaaataggatataattcatctgtctgacatccttcccccattaatttgtaatgccacttctgagatataccaagtatccatatatgtgtgatttggtttcttgtctttccagtgtatactactggtaccaaatgtactgtaccaaacatactgggctttggctctctatttgaaatgttattatattatattcagaatatggtatgtatggtatcagttttttgtatatgttgaagcttaatttgtggtcaattgatacgaatattccaagtggttttgaaaagtgtgtgtgttctttgaatggctggatatgagatccctttcgtattcatagatcaactttagctatttgatctactagtttctgtgaaagatgtcaaaatcattatgattgtggatttgtcaatttatctttgtaagtctttcaatttcgctttatatttttgagaccatattgtcatataaaagctcaaaattatatacttctggtaaaaataaatctctattatctctatcactaataatgcaaatatatatatttgctctattttgggtttctattggctagtttgctgggtatggctttctttcttacatttctctcatgttatgttttagttgtgtttcttgaaaggatttttaaaatgttatctaaaaatctttttttgtgatgaattagagccacttattctgattagagttgtataaggattttttctacaatcactgtacttttctattgcatcttttttctccttccctgctttttattggtttaattaaacctatatttctttttcccttatgtatttgtgtgtgtgtgagagagagagacaatctcagtctgttgtccaggttggagcacagtggcgccatcatagctcattttagccctggacacctgggctcaagccatcctcccatgtcagtctcctgagtagctaggactacaggcatgtgctactatgcccagctaaatttcaaactctttttagagatggagtctcactatgttgcccaggctggtctctacctggcctcaagtgatcctcctaccttgacctcccaaagcactgggattacaggcatgagctaccacacccagccatatattctttttgattaatggatttcatcccacccttttttaaattatcaaaaatttaatacatgcataattgacttcaaatattcttcagttaattagtagctcttcttacatttcccaaattaagagaactttagacttcttcatccccttcaaacttccatgtcatttttttaccccatgtttaagtcccctacagttagtcatcttgttattgttgtatgcaaatagggcatgattagattgacccacacttaccagttttcttgctcaccactgcttctggaaatccttcctcctagattcaatttgcttctcactgaagtatatcctttagtatttcttcaagtgatcatctgtgattggaaactcttgacatttgtctgaaaatatctttatttcacccttactcttagatgataattagctgggtgtaaaagttaggttggcagtatttttgtcagagcactttgatgaaattattcaataatctattcatgtcttcctgctgaagaaaactctatttttacctatttctcccctttcaaagataacctgttttggtttttgttgttgttgttgttttaggattttgctttgtcttttggtattctgcaatttcagtataatggcatagatacagattatttttatttatctgatttgagtttcatttagcttttttttaatctgaatattttgtgtctcactacgaattctggaaagatctcaactgttcttctccttaaatatatattgcttccacagataccctaaactccatcatttctcaacttctgaggatcatcactcctttgcttatcttttctctcttctgcatttccagtctcttacctattgtatcaagttcatcaacaagtcaacttgccttggtgtttcccatcttttaaaaaagtccttccttgactccacatctcccttgagctatcctctgtctctgttgaacatcatagccagccttcctgatagaggaggtacccacatatttctctacttccttaccttcttcagttcagttgagtcttacttctaccctcagccatccaaagagattgctgttgctaaggttgctaatgacttccatgtatctgagtcaatatttagtacttatttcattgaacctcttatcagcattcaacataattgaccattcattccctaaaacattcttcacctcttggcttctggaacactttgttggttttctctaaatgtttgaacactgagtgctcagggatgagctctcttttgttttctgctccctacctttaatataatcatgtgctatataacaatatttaggtcaagaatgaaccacatatatcatggtgaacccataagattataatggagcttccctatgtaagtgtaccattttttatcctttatactgtatttttactgtaccttttctatgtttagatatgttcaggtacataaatacttactgttatgttacagttgcctacagtatttagtaaagtgacatgctgtagaggtctgtagcctaggagcaataggctataccatataccctagatgtgtagtaggccctaccatctaggtttgtgcaagtacgctctatgatgatccccctcaatgatgaaatcacccaaggatgcttttctcagaatgtagctccatcattaagtgatgcatgaccatactttttgttcattcacacaattttaaatatcatctattcatcatagatggtgaaatttatacctctggtctttgctcctcctctgacctctcaaactatgagttcctgcttgacactaacacttggatatcatagcagcatttaaccctaacccatctaaaatggaattcttcactttctccccagaagagtgtctttcccatctcagcaaatggtatcatcatttacctagttcctaagctagaatctcagagtcattcttgactcctgtctccctcaaaggcccacacttctactgtcaggtcctataaattctgtcttcaaaatatacctcaaattcttccactttccatctccactgccagcatccaggtgttaggctctgtcattgttcaactagactacaacatagttttcatatctattccactattaacaccctctcattcattttcaacacagttgtcagaataatcttttaaaaaaatctatgtgaagtcctccaagaacttcctactgtacttagattgaaacaaaatccacactcatgaataaagcctttaaggccctgtgtaacttttcctatcctaccttcagcttcactccaattcctctccccgcaacttttggtgttctggccaccctggccatctagttccttcaccacaccaagttcttttgctcccgcaaggcctccatatattccttctgctgggaatgatctctgtccctttctctttccctgtggaagagaactggctcttcttttacatctggtcaccttccaaaagaggctttcctgaccattctggttaaggttgggccccacttggtctctctagtagcagcctcatctttttttcttctgtagccctttttatacttttttttttctggagttgcattttacatattattttattatatttaattgatcttcacagcagattaacaattgactttgctgccataattaagagcatttctagtaaaatattaagaaatgtatgattgctgaatttagaaaatgtccaactttagataggatactttactgaggaactcttttagtactgcattcaatcttggtaggcctctaagtgaattatgacatttggccctgtaagtccttctgggatgaattctctgcattcctgttaaaaaatgctttgtcatttcttagggtcattccctagaaaaatgttgagaaatttttggcatcattttcaaagcaggaactatataataggcagtttgcatatgataaactgaaataccagaaagactactataacttcgctttattacagagttataagttgctcttttttatttattaactagcttatcatctttctctgcttttactcattggtttccttagaagagatccagatccattttgtttgcctctttatgtacacccaattactaacatgtatgaataaagaactcaaactgaggctctttttttcttaagcagaactcggatgaacacctttccaaattgtgaccacactcatcatcctgcttttttgttaaataaaagcagtttgtaaaaaaaaaaaaaaaaaaaaaaaaaaaaaaattgtctacatttcttttgttaatagaggtttatgactttgaaaggccttctataatgctttataacattttaactttgtaaaaattcgggacatttttgtgcacatttgtatggccccgatagactgcctatggtcattttagattgaccatggccacatttccttcttaaagctctttgatgccagtatttttgctttgttttgttttcattttaaatcataatttaatacaggaggacctatgcctcaaaataatcagagataagaccatccttactttgtgatattcagaatatttaacaactggctgggagcatcaatcaatgagaccagcactttggtcaaccaggaaagattttcagcttacttacctgaaggccacaccaagtcctactgaatatggaaactatctctggggaaagcaattccacaggccttattggttgcctccatgtttagccaactcctttactttttaaaatgccttttttggaagtagctcaaagacttggaaccttttaattatcccataatcatgtcttatttatacctgcctggatagtgtagagatgggaaaacttcagtcaaaaggacacagtaattgagttctgccttccagaacttgctgagctaaatgcaggttatagcgaccagcttgggctatcttgggtttgtccacacagtgccttgttgtgggtggtcacagtcttactccttagctgatggcatggcctataatctgtttctccacgttcctttctgactctgtcctggggcatggtggatcgatgaaggattttcaaagatcaaagcacatctctgttttctcaggatctgtttgcaactgctttactggaaggaaaagcccagtgggggatcgctcctgctgatcttcattgacatgtctgaggctacctgcctttaaatgactctgagctttctgacatttttcttctttttggatcacaggtccacacgttccgaggcccacactggtgtgaatattgtgccaatttcatgtgggggctcatcgcccaaggggtccggtgctcaggtagacacagaactttcttcttttccaattatatgaaatgccactgtgctgagctggaggatgtctctccagagctgggaaatgtgctcagattagctcaaaagtctagccttctgcagggttcaaggcctgtctgtgcttaatggggaaactatttcaagtgtttgcaggaatgaaaaagaatatatcatgtttatgcaagaaaagaaaaaaaaaaacaaaaagtacatttccttaaacacctacctgcctcttacaataggcagtagtccgtaaaagaaaaaaaaaatcaattccaatggaactgcatagctagaaaagccatactttgtcctaccccatcttgctacaaaaggtaagacataaaaatagtaatagtgctggtgaatatttaccacataccaggcaccagttaatctctatttatcatgtcattagcctcaccaacagaccttgggggagatgcaattatcctccattaaaaaaaaaaaaagacacagaggcttgttatttgcccttggctacgcagtaaggaatagaatattgattcaatgggagccagattccagagttcatgctcagtatctcattgtcatcagattagcagtgaaaccatgcaccttgatttgatatcacatattttcaaagtagtttgaaagcctgggtgattttccatctggaattggaggtatacacctattgctaacagcatacatcttattaaggtacatctaacacaatgataaatgatacaaattaatgtgtaactgggtttcctaattcatgttgccatggtttttctggcaaacacttgtggctgggagcaagaccagcctcctctgatattgatcaggtttctaccaacaccctgactgacttcttccttgctaggatatgatttttaaaaatctcaggagcatttagaatacaataaggtaatgacactaattaaggtgatctttcccattttggctcacagcatcccgtaaaccctaagtcctcctctctgcctggaagaggcttctagcttccattgtgtaaatacaccaatcaccggtgttgatacctggatggttcaagtagttccacctcccccattgcaggtctatgtttaaggggtggtcaacatagctcagaagcagcttctccataaatattcagaaactctgtttaacactaaagactgacttgccaggagccacaacgtatctcccagctcagccactgagcaaaggggtagaatatctgaattactcagtggtcattaatttggcctgtccctattgtacctatcaaaaatatccctaattgctggtattaaccagtttcagcaagaaattggtccaaagtcaatattatgagaacaaaactctgggcttcatattagctgtgaacagcaacttttcaagtttctctgggataaaagcgtttttgtggggtttttttctggttttgtttttttttttaaataagacattttctgaggccatattgttagtattttccaatggctactttttggccttatatttcctcttagcagcagggaggctaaaaactgatcatgaaaggttaggaagaaccatcattgcctctcagctttccatatattacatcttttaagtatttttagaatgcactggactttatttgtagaatatggatttctactgctttgtaaaaaatggagcatttttacatttgttatagaacatcttaattttaataaaatatcagtattaaactctacataaacacattgttgctttaggtcttaaatgaacatggatgattcctattatatgtggtacctagggcagcaattccaagaggtagaaagttgaatggtagttacaggggatgggtagatggggagttatattgtttaatgggtatagtttcagctttggaagatgaaaaaagttctggagatggccggtggtagtggttgcataacagtgtgaatgtacttaatgccaccaaaccatacacttaaaaatggttaaaatgataaatttatcagaatttaacaaaaaaatttaaatgaagtttgtaagacatactaagaattcctaatgaaatcacttcagaattgctgggcagatatacttacatttttttatcaccatatttgctatttattttatttgacctaacatgtatacaatacttaactatatttcagacactatgctaaacactttattaacttttatttgagcctcatggctaatgccaggaggtaggtgctattatgatcttctatagaagaggattcaacaggaaacccagccaactctatttagcgcagttagccaaaatttacattcactagatagatgtatcaaaatattattgaagtcacttgagctttgttgaatttctcatgttgataaagattaattagaactgtttttgttttttttattttgaaaggaggtagacagagaactcagccaataaaaattacatgaaaatcacttagaaattaccactgattttacaaaagtttagatcctctcaagttcttggtgtgcttaagtgctattttataaagcagatgactacaatattccttatcatgtgtgcacgtgtgtgttattctttgtgcctaggaaaacagtattagaagatactttgagtagagagcacatcaactttgaacaacttcagcattgaatttttccctttcagaatgtagcagaatgtagactatgctgcctttttttttttttttttttttggagacagagtctccctctgtcaccaggctggagtgcggtggcgcaatctcagcttactgcaacctctgcctcctgggttcaagtgattctcctgcctcagcctcctgagtagctgggattacaggggtccaccaccatgcccagctaattttgtatttttagtagagacagggtttcaccatgttgactggtctcaaactcctggcctcaggcaatccgcccacctgcctcggcctcccaaagtgctgggattacaggcgtgagccaccacgcccggccaactgtgcctttttatcatcagagaaattccgtcagtggatattgactgctaacaggctcttcgtgttttcattgaactttaaaagcacccttttcagctttggattttcatatgaactttataaataatcatcacattacattacatggtattgttataaactctcaagtactcctactggtgtatatagttaggcattatttccactcacaggtgtcaaaataaggcatgtagaaaggaaagcggcctacccaaactgcccaaggaggaagggattggaaactatggggcaaccttccaggaaaggggaagaggataccaatggtcgtgggcttctcaaagcaaagattagagagtcctgcagaaagagtaactctgcctcccacacaaggagcatcaagagcttaaaggaaagagtctggaacaaaccctaggtgccctttataagccaggactgtctgggaatccaaacccgaaaacctacttgtggacccaaagggttccagcctgaaacaggaaaacatatacaaaaaaacctgatcaattacctaagctgtctcagatgttctgttcttaaggtccagcgacagagaaggcttaacgagaaaaatggaatcatataagggtttagtgattagagatgatacttgtatttatcctgtagagagtcctagaaacgggatagatgttccagagaaatatgtcaaacccttgggtggtgatatttttatttttggcaacatataatttgtgttgtgctttgacaaaagggctgggctaggctaatgtggcttctttgtttacagactgtggattgaacgtacacaaacagtgttccaagcacgttcccaatgactgccaacctgatctcaagaggatcaagaaagtgtactgttgtgacctcacaacacttgtgaaggctcacaacactcagagacccatggtggtagacatatgcattcgggaaattgaagcaagaggtttggaaaatacttcctattatagtagtatagtgattttatttttattgtttgtttttactgttgtcaaggaaacagagttgctctactactcttgttgggaaaatgacctacgcatgtgtgcgcacacacacactctctctctctcacaggtagactcaatccaaccagctatatcaatttccattgtatatataaaccatgcatatatgcattcaaaaaatgtttactgaacatttattatatggtaggcattgaggtaataaaggtcaccattctcaccttcaagaaattcatacttcagctgggtgcagtggctaacgcctgtaatcccaacactttttggaagctgaggccagacaatcacctgagcccaggagttcaagaccagcatgggcaacatagtgagaccccatcctacaaaattcttttaaaaaattagccaggtgtggtggtgcacacctgtagttccagctactcgagaggctgaggcatggaagaaattcatactttagagtgggcaatcaggggagcaaataaataaacattgtggatggccgtgttcagggtaccatggagtcacaaagcaaaatgttttaatcctatttaaggacggtgagaagggttatggcagaggtgaggcttgaattggagctttgaaaaaaaaggtgcttctgttaaataagaaattgttgagtaacacatacatctcctaccacataaaaatgtgctcctaatattcatcgtttatttcgaagaggagagttcaaagatttaaaagatctatgcaatgaaaaataaaggaaacaaggaagatagaaacattccaaaaaatgttctttatgttgtacatgagtcacttttcctttatttgtgctttctttggccactgttcagtatcaaaatgttcactgaagttgccggatataatttgggtgatttggccatgtatagagcctttctataaggcttaaaccacttttgccatgtatcatattctgttatactggctatccattattgtgtcctaattggcttaatatattttatacatatatattcattggtcaactaccccatttttccaaagcacaactaaagaggatgtcatagcttattatcccaacccttttagagagaggaaattattcccttttctatggagggggaaaaccatagctatcctgttccctgagaacttgctaatttaatcccagagtgtaagaaatgccttctatcttttcaccactgtggctgacagagcttaatgagtgctttgggatctggtgaacatattaatccagtggctaaactgggtaagaggaaaggagggattccctgcctctggatgagtggttgggacaagtgaccctgggccctgcagtttggggtcagattatcagcctctccagagcctgcagtcagggcttttctgaagaagctggggtcctcccattgtgatccttaccaaagacaactgataattcaggcatgataactactgacatgtctaacatttaagaatagggggcactgcactaagtttgcctagtacaagagcgagatagagtagcacaaattaggaattgatgccaaaagagtcacagcacagggattagagccccagacaggtattaggggcctaagcatgcaagcagaaccagagaatgcaccgggagaaatttgtatgacacccgcattcccagctgtggggccaccactaccaacacttttccctgtcttccatccataaaaaatccttattgttctccaaatgttcttttatgttcatttgtctctgcgtgatgtggcagagtgaaaagatcaaggatttgaagttaaattatcagccctgtctcttactggctgtagtatgaccttgggcaagttgcttactacatttgcatatctgtttcttcatctataatatgaatggaatcaactgtacctcataaggtggttggtgaggattaaagtgacttgatacataaatggaccgagtacaatgtccaatctactgaactcaatctatgttaattttgccttttcttggaatgacccacacccatacctccacctccaaatctgtctaactatattatgtagcctgtacatctcagtgctgtcacagagaccctgagtaacagtgcctttgacaagatagaaatctatttctttgcccagtaatagtccaggtacccaggagcagtccaggaatagtctgttccaccgtggcaggaacccaggcactgcagcttgttgctctgtcctgcttgagtgctatcctgcgtgcacaatcacagttggccaccaccatctcatctgcatttcacttaacaggaagtggaaaagagcatgctccattccttcaaggccacagaagctgtaaatgtcacttctgctctcacatgggccagagtttaatggccactgcaatggatattgttctaaaaatcaaaggttccattacaacagaagaatgggagaacaaatattggaaggatagctggcaacttctgctactctggcaaactctaaccatcctttatcatttccttcaaagattagcttcttaaaaaagcatctcgatgtaatacagggtgacgctttgctcagtgaagcatgggctaaagtcaggaaaattacccccatttaattataatccaaaccatacaacttggcatattatataaggcatagatttttttttttaaaagtgacgggatacatgtgcagaatgtggaggtttgttaaataggtatacatgtgccatggtgatttgctgcacctatcaacctgtcatctaagtcttaggccctgtatgcattaggtatttgtcctaatgctctccttccccttgacccccaccctccaacaggccccggtgtgtggtggtcccctccctgtgtccatgtgttctcactgttcaactcccacttatgagtgagaacaaaagcatggatttttctacgttccttgaaaacctggatttctttgaaagtgactcagtgaatcttatggctgaatgtttgtgtcccctgccccaccaaatttacatattgaagccctaatctccagtgtgattgtctttggagacggaggtctccaaagaaataattaaggctaaatgaggtcctgagggagggaccctaaacattatgactaatatccttatgagaagagacaccaaagagcaagctcgctctctcactctccatgcacatataccaaggaaaggacgtgtgagagaaggtggccatctatgagccagaaagagagcctcaccagaggccagaactttgattcatccatcaacaggcagggttcattgttcactgctaggggctcccataatccactgggtctgtgcctctgtggcagtgcatgttccaactggaatgagatgtgctcatatgcaccaacatcttagaacaggatgacccacaggtttcgtcttgtgtggcaactccagttgatcagtagtggtcacctgaacaattggaactgagatgaattctgaggctaaatagggctcagtgggaaaaagggctgagatcaactaagagtatctgtcatggtcacaggagggatgaggggaagtattcgtgatttacgccacgtatttgttgtctctgatgcatacctaatgaagacccttatatatggcagataatacatactccataaatgttttccaaatgaaaaaacaggagaatatgtgagttatcaagagtttggcagaatatatggcggcagcagcagaggctatttgtttgctcatttttactgtagctatagttttgatagcagctagtttgtgacatacaaagtctgaaacccagtcctttatccctgctcatacttttgggaactgactcgtttttaggacatatcttaacaaatcaataagctccagggacagaaaccatgtctttttttcttagcctaaatttgcagtgatccaatttccagaagcaataaccaaaactttattttcctgcatctgtttgtataatcagttgtctaaaagtataacaagtaaccgtttttaattaaacagttaacatagtcttatttacaagtaaacatgaaaggctgtaatagtctaattttttccaatacaatcagagtaatacagattagatacccacatacatacatgtgtgtatctagtacagtgctacatacaatatagcacatggattaagatgatgctaggtaccccatttgcgctgctgtgattattacacatcttatgcctgtatcaaaatatctcatataccccataaatatatacacctactgtgtacccacaaaaattaataaagatgatgctaggaagaaagccaggttgcttcctacgatgacgaaattcatgtccatcaagctcatgaacacaggaaaggaagtaagggaacggtccatgggaatcttaaatatcagttctctttgcaaagcagggaaggatgaagactggatttccattgagatctccactgctacatgggcaaatgagaacagacttgcctgggaaattgagacagacaagtccaagttctgatgcaacagtgtgtgataaataaaatcactgtctatgtttgctcattttctgatagcatgtagtatagacgtgaaattagtcttttttttttttttagatgtttcaagaagctaaagtcagtctctctctctctctctaacaggattaaaatcggaaggcctttacagagtctctgggttcactgaacacattgaagatgtcaaaatggcatttgacagaggtaagcttgtactttcttgaatgccatctgacatcctaacacccttctcgattggaagtaggttttaatcatagtagaaatggggtttcagaactactaagagttgttcttcaagaaacggaggaataatggcttacaaatctcatgtttctgcctcactgggtgaagtgttaccttcacagccattgataagtgatcactgtcaatgggcagacaatccacatggcattggagtacccatctgcatcccctgtctcagaatcccattcttctcattctctcaaagctccaaagaagggatcatagggatgggagggcacccccagcactaatgtaggggaaggcagtggacatgtaggagggaactgcttttgttctttataactgtggtgtatattctctagaacatactatctcttaagtcagatatcatggccatcctggggatcctgttaaaaatatgggtcactgggacccaacttgaagactcattcagaaagctggataagcccaagaatctgtatttttaataagcaatccaaataattctggtacagccagtcaagacatggaagccctactggatagagcctactggatagagcctctactttgtagtgtggtatgtgaaatcagtgaggtagccctccctctctcttcagacttctctccagttcctcctccctactgtactgcacactccagcaatcctgaaatacaccctatttgttgccatgaagaagtgccttggctcacattgtcctgtctatctgaaatgtattcacctctctgcctggcaaacacctgtaatcaggggtcagctcaagcctttcctccttgaggaagcctcgctgactaccccaagctaacctcagagctccacttcctttttccacatccccccacattctccacacttcttcagcatagcaatcttcctatttccttgtcattgttgagttgcatgtctgtcagtcagtctaactagaactgttggttggcagagagtatctcttttccatggttcatcagggcttaatggtgcttggcacatgacagattcccaataactgtttgctaaatatgtaaataatgaaatcaacatggcatatcttctatgcttttactgttttctatacatcggcagcttttttcatcttcagaaccaaatttgctgaggcatttattcttttaattctttatgcaaaagatattaagaattcctatatgattaaaacatttttatctaaaaaatgtcatagtctgtgacaaattggagtggtatttcctaacggtaaaactaaaagtcaaaaaatgtcttgagaactattgttagaaatggtaagaaatataggccaggcacggtggctaggcctagaatcccagcactttgggggttggaaacggagcaggtcaaaacttctgtgctgatcctttgtactgcctacaaagaaataattctggaccaacaataaataccagatacattagtataatatatttaaagtgctgaagtgaaataactgtcaaaataggccaggcgtggtggctcacacctgtaatccgagcattttgggaggctgagacaggtggatcacttgaggtaggagttcgagaccagcctggccaacatagtgaaaccccctctctactaaaaatacaaaaattagccaggcatggtggcacgtccctggaatcccagctactcaggaggctgaggcacgagaattgcttgaacccaggaggtggaggttgcagtgaaccaagattgcaccactgcactccagcctgggctacagagtgagattctgtctcacacacacaaaaaagaatgataagaaatataacatcacatatccaagaggaaagggtaaagtttcccagattaaagtcctaggggatcagggaggaaggatcaagttaaaaacaaacaaacaaacccttcagtgagcctgaaagaaacaataagaactgaaactattcaacaatcattttgtgaacgtgacttccaaatccaagtctaaaaaacactggtggagatgtattagagcttcttgatgttctcttgtttcagattagattgtcattttattatgaaccttagtgtccataatacaaattattgtgctaaatttctatttagcaaattaccaggggctgggacccaaatcactgtttgaagtttgttttatcacccgtttgcctgcacaaaccctcagaccctacctccctctcaccaaactcctttctgttgcctcctacacttcagtgttactagaagccaaaagagttagctgagacttgtcagggagcattcatcgctggattttttttttttttcctttctgtacatgccttggtgaaataaggtcctaattaggacttggatcactgattgtttttcagatggtgaaaaggccgatatatctgccaatgtctatccagacataaacatcatcactggagcccttaaactgtatttcagagacttacccatccctgtcatcacatatgatacctattccaaatttatagatgcagcaagtaagtacttcaaattaattttttatttctaccaaatttttaagtacagtgcttttgaccttcagataattaaaactcagaactgtttaaattattgcatttgtgcctgtcttgtcaagtgagggcacaacaataaatagctgaccaggcatagttcaacagctgagctgaaccagttctaagaactctgtgggctgatgtatgtgtcaggcagttctgtccacattgttccttgtatgctgggaaccaacacagtcaggcctattatatgttgaaagcatgaatatttctgtagcagaaaaaaaagtcttcaatgaggactgactagatcatgggtatccaatcttttgtcttccctggaccacattggaagaagaatgattgtcttgggccacacataaaatatactaacattaatgatagctttaatgataattttaaataatttttaaaataaattattttaaaatcttataatgttttaaggtttacaaatttgtgctgggccatgttcaaagctgtcctgggcatgtgcggcccataggctgcgggttagacaagcttggtctagattaactacttttatctgttaggcagaatttcattcctagtcagttaaagtcacaagcaagttttgtctattgatgctgttcaaaatgaatagagggccagaatacactgtgtcaagcagtatactagaacgtctcaccagtttaattctctcatgtaccccatgtggcaaatattataatcccattttacaaagaagaaaagcaaggcttggagagctgagctcatgcgtccaggaatgggacatcaggatttgctttccatcagcccggggttgctcattcagtgtttggcacttgggcccactgctgagggagagaggaatagagtgaaaagggggcaggtctgggggaaggggctacactttgcccaggaagagtcaaaagtgaccaaaggtagattcagatgctgagacacatgacacggaagtcaagctcactttgaggaagtttttgcttgttgttgttgttgttgtttttatttaaaaaaaaaaaaaaaacctttaaaggttgaaaagtttaggcatgctgttaaatgtagtaatgagatgcctgatggggagacacaaaggcaggctgggatcagtgtgagatgcacttttcggatgagctgaggccctgaccccggtaagactattccctccttccggggccctagtggtcctggcaaagaaggttctagcatctagatatcctctactccaggaggaatagcaggagggttttctttgagtagctgccagtacctatcagagacccaaaagccagaagcatgtactcttcctcccattgttaatgtgtccagtctccacttcctaacctgggctgtgcaccggggttaagtatgccaacgccacggtgagaagtgccatgagtgcaggctgagttgggtggctcattgccaatgtccttgccttgtaaaatgtattaggttgtagaagtccgccagggaaagactcattagacaactgcaaggcaatactaccgtatgtggtgcagtttaaattaaaacttgtgagagggatatttctagcaaatctagtgttcagaagaaggcaaagcatagtctgcacatatgctccctgactgtaagcattctgctggtttacagattcatggagggcaaggacagtgtccagcctctggccacccagaggacattcaataagcatgtggtgctcagcctcaaactctttcctgaatgacacaggacaccaacaaattgattaagtgaaacagtgcttggattgcatgaatttattagaatccttccccacttctggctaaaacaaaaacttcttgttacttctctgaaaacttgaatgccacactctgaactaatacccatcatgcgtgaacttcacagaaatctccaatgcagatgagaggctggaagccgtccatgaagtgctgatgctgctgcctcctgcccactatgaaaccctccggtacctaatgatccacctcaaaaagtaagctcatgtctcgtgcacaaagcctgctctgctcctagagcggttaatgcatgaggaaaagtggacggcattcctccccagccataactgctggagtttcactgtgccaggaaccactccaggcactttcagtgtatcatccctatgaaaggggcgccactgtgatggctcacgcctgtaatcccagcactttgggaggccgaggtgggcggatcatgaggtcaggagattgagaccatcctggctaacacggtgaaaccctgtctctactaaaaatacaaaaaaattagccgggcgtggtggcagccgcctgtagtcccagccacttgggaggctgaggcaggagaatggtgtgaacccaggaggcagagctggcagtgagccgagatcgtgccactgcactccagcctgggcaacagagcgagactccatctcaaaaaaaaaaaaaaaagaaaaagaaaggggtgccattaggggccttgtgtcacttgtgagattgctgatgcctggggaggttacacagctgatttgaagaggtgaaggcaggatcccaggcaggctgatgtacagcctttaactactctgcctccgtgtctgcatcttcatctgacacaagccctgtactctgtgtcctgttcatccccctgttgcttgcccctttccaggctcctgagactgcctgcctcctgggagagcacattcccagcctggtctcttatttttctggatgtgtgagttctctctcattgagtaacaaattgctcccgaaacttagtggcttaaaactgtaaacatttattatctcatagtttctaagggtcaggaatccaggtgtgactcagctggctgcctccagttcaaggtctgtaatgaggctgcagtcttatctgaaggcttgatgggtctgtaatcccagctacttgggaggctgagacaggagaattgcttgaacccgggagacgaaggctgcagtgagcgaagatggcaccactgtactccatcctgggcaacagaatgagacgctgtctcaagaacaaaaaaattcactcctgaaggcttgatggtggtagcatccatctccaagcccactcacatggttgttggcaggattcagttccttaaaggctgttggactgaaggcctcactccctcaccagcagtttgctggaggcaaccctcagttccttgccatgtgcatttctccataggcagctcacaaaaagccaacaggcttctctcagaacaaaaaagcaagagcacccaatatgagagacagtctttttgtaagctaatctcagaagtgacatcctattgcttttaccgtgttttatctgttagaagcaaatcaagtccatcccatactttaggggaagggatgcagggtatgaattccaggaggcatggatcgctgaggtccatctcagagagtacctgccacacacacagctgtctgcgtgagtgtgtgggagacagagatggagacgtctggatgtttatgggacactagaacctctggtgacactattctccctaaaccttgtgtctctctctttcactgcacatgtgtaatgaggtcgatgaattggtgttataacattggagggatcagggcacatctgtgtgcctctgtgtttttgaaagatacttggcagcagcccattctttgataaaaataaaatgaaccgaaaattgtctacattgaccagtttacagatctacttagtatgtgaaaagaagcaaacggaggactgtataaacagtaggtattgagatttttatttttctaccttataagacatacaagaagacatacaatattgttgctcagattcagggtgatggtaacatttagctcagaatattcccattctgattaatttactgaatttaggagtgcaagtaatttttagataataaactatgggtatcacatctggctttcaattagctgtaaaatacttattgtgatcaatatccagttgttacagtttggaaggcaaagtaccactaccagaaaaatgctgacacctttcagctgaaccttaaatgccaataatactgtatctttatcatagtgggtttgccagccatcttgtttagtcaggcatagtgcctgacttaagaggaaactgtgggcactttgatggtgagaaacgtcctctttccaaccttcttcttaggctttgtggcatgtacatgacacaaactgggttgaccttaaaataatactcaatggctaatcctaatgagttataaggaaatagaaagggatggctttttatgcacaacctaaacacattttaattatattttcctaaacacattttaattatattttgctcatttttggagaacccattcccttttacatctattatgaacattctaaaacttaaagttgtgaaaacaaaactctgggagatagatagattgtaattttattccatgaggaaggtgttaaaccagctttgcagtttgaattttattcttaaaggctctgcagttcttacctggatgtcgaaatgatttttaatttcaactgctgtagacctcatcctgtgggaactagaaataatgtccaactgccgtccagtctggcgacattccagccgttcccccaccccacgataacggcctgactcttcctcaattcatgacagcccattctacacataacctttctcctctggcaccggtcctcccagcagagagggatcctgcccttcccttcccactctccagcatacagaccagcaggaagccacaagagggaaaaaaaaaacgccttctgtataaggcctatgaaaggaccatgggccagcctcagaatctgctgcccctacaaaccagtattcctcaaatgatagttccacatttacttaataaggaggactaattttctaattttaaaaattgtgttcctgccagattcacataagtaattcatttccaccggcgaaggcaatgtcaacaatttaaaacgaaaaatcagtaaattacccttccaaaaatacctttctgctgttctgattcccaatctttttcttgcaatttcctgaaccagagatgttatcgggacttacatacataatcaatacataaaatcaatcctcaagtctccataatgtctctgttctatatgtttgttttgcagggttactatgaatgaaaaagacaatttcatgaatgcagaaaatctggggatcgtgtttgggcccactctgatgaggccccctgaggacagcaccctgaccaccctgcatgatatgcggtaccaaaagctgattgtgcagattttaatagaaaacgaagacgttttattctaatccatcagggaaatgagctgaatggccccagcaccatccaagttgacacagctaaaggaataaaaacatttcttaccacttgatttgttttccaagcaagtgctagaatttcctggactgcagaggatcgctgagtggggtactgtgtctcatagacatgcgccacctccacgtgagaacaagggtgaaggtgagggaagcccctcaccttgggtcttttgctgtgcctcctatgtatgtctggtttgctggaagagtgattaatacatctttaatttattaaaaaacaatgtagacctttaaacttcagtcttattggtaataaaagggaacttaattcatacaggtacttgatacagttatacattttccacttacaaaaagaagacaattctgttaaatgaaacgtgtatcgtaaaatgtatttttattttacccacgagaatgttgttatttttagcaaatagaactcaatgcagtgcattggttattaccctgtgtaccttgtccctcattttgctgtgacaccctgaaaaagctgaccacaaatgcagtattatcttgacatacctctgtcctcctcagtgctttttaatgaaatttcacctgccccttgtgttcctgctttggatagtttttgctcttaagcattggcattcttctattgtatggtatgtatttatagcaattgtaggatggtctgaaatgtccacacactttctatgcatacaaattttgtgaattcccaaagtatgctttggaattggtcatagtcttttcgtatcatgagtgtgtatcccagaagatacagaatgcggtcattttacctgaaattatttgagaacactggatgtatctggtctgtgtaaaaagttagcacttaccctcttttcttcctggccaagccctctgaattcatctgttaatatcaaattgtatttttgccacatttctgtattggtgaaaagcgaatctgcagaataactgtcaacgtttttcattcttgttttacaaacctattttttaaagtgagaataaggttggtttttaccaaatatttgttcctccttgacaaaagtagctctgtgtggataatatgattttattactacagttccagtcacttggttatatttatcttagcatgagcctttcacaccaagatttctatattttgtaacataggtgaaatatttaaaacatcaaaaactgtaaatctagatttttaaaaaatccaactgcaatgtcttttcctttgattgagatgatttgtgtaaactcaccagtcttgctttggagtgagcagaagagaatgactattttacgtggagcatcattgtgtgactgttgacctggacagtcccaagggctatgcagatggactccattggcacagggaggtttgacctcttccctgctattatccctcctcccaactgtacagatttgtttgttgtagtttatgtacttcttgatactgtcaaaaaattatctggaaatggttttattttgtgaagtgaacaatactttgtaatttatgatagtgtaaatggaaggcaaagcatcacatgtattaaattcttctgtctattattctggagtatgtgcaagaaagtggtttggagggatggggtggtggatcatcaaaacattgtttccagatagacgctggcaacaaattttcagtcatcactgaaacacaatgagaaaacagcatctcatcgagtccccactccttctgcaagctcccttctagagagcctgcttcaagattaaggccctgaggctccacattcactttccataagccccactgcatggatgcatcatcatacagaggtgaaccgtttagggcaaatcaccctaggccacttggagggtagcagaacaagacttttaaagtcagaaagccctgagtttgatcccagatccatccatttagtactacctgcatataaccatgggaagtttgcggctctgaaaaactgaagatgataatctgattgtgacaccttaaatgaaatttatgttctagggtaattagtaatagttatttctcattattaccattttagaaggggaaaggatataacatggaagcagggatggaagaagcataagaaaaggatttgtcacaggttcaatccaagtccaaatagcactaaaggatataacaggcctctataatgggtaatgaagttcacttgactccttttctcaaatgtgattccaacacttgatctcctcttcctttagtctgaagccagctcacccacacctgtcttccccaccatctggcagcctgacatagctccccttacctggcttgaaattcctgctgttagaataactctggtagttagttagaccatcaaggaggcagcactgtttccagaaacccactgttaaattgtcaacaactgagttgtgggaagtgggacaggagcagggttggtgggagaatgcagtggtgaggatgggaggagacccctttttctttcttccattgacataaatgggcattccagatgacctggtctccacagcttggaagggctgctgcagatgtcaaggataacagcctagaagggaagagagaggaagagagaaggttaagggaaggacagtgaagagagcatcagaaagaaacataccatatagatgaaggattgcctgggctgtcctggctcctgtgaaaacccaactcagtttataaattcccaagtttatcaatatccagtgtataatcagtcttttattttaaaaatataacattaacttttaaccagtatgtatcaagcatttattaatgaggtagacactgaatatttggaggcaaggaaaaggcttatcgcactggaagaattaaacaataaagttagtctggctagagagaggaaactgatcatgttaagggttttggactcttaaggggaatgggtactacatatttgtctccagacacagaatgtaggaggtaccagccatcagggccatttccaaggtcggtgctgtctttctgctccaccatcctaggattattgttatttccccttgggttttggctcacatagttacaaggaggctacaaag
